United States Patent Application Publication US 2015/0354009 A1 - sequence listing, part 19

SEQ ID NO: 545 - DNA, 814697 bp, Homo sapiens
gatttttaaaaatcagaactattgacatttctggtctcctcgtcgcttcaggctgaagagcggagggggatccgcgggccgagggtccccctccctgcccgcgccagggccgctgggtgacaccgaaatccagaggctcccgcccctcgggggttcctcctcccgcttcccgaggtgactggttggcgcgaagcgattggcgatcccgggcgcgatcctggccgcggctccccgcgccgcgccgggtgaatggccgcgggcggaggatcgggaggcgccgggcgcagaccaatcgcggccgccggtgggagtatttgttattcacatggaagagacttggcgcctgctaggccagctcagccccctcagcccagagatcagccacaagtgcggccgctgtgctcgcctcacgcggcggcggcggcggcggcggcggcgctgacatggagctgcgggcccccggcgggcttcctcaccgcgccctctgcggggagcagggtaagactcgccgcccggcagcagaaagcggctccgaggaaagcaagtgccgaaccacgggacaaaaagcccctggcccccaaacttccccaaaacgccctgcttgttggaaaaggagaatccccccgttttattcccctttccgttttcttctctaaaacctttcagcggacagccaggtgcaccattccttctcatatcactctagtgatttgtttttcctgagcacaagtagatggccctgcatgtccgtagtctgtgagagaaatagcgggcggaggtgacgggaatggggggagaaggagagtgggcaccagggggcgaggggctggccgggcattggagcttgattgggtgtctgttgattttacgttgcaaagaacaaggcagccacccctcttgtctgcccatgattacattacagtaaagaggttcagaaaagagggagactttacccggaactcccaaggcttggagatgtgatcccccaaaagtttagtcggcgaatgggagactgaagggtgacgggaagggggcaggcgcgctcggcgctctgactgggcgtgcggcggcaggattttaaagcgctctgcctcggatcgtctgccctgggtgacctcccggacctgccctggtggaatccggacttgccccgccgagatgacgaggtaccttcgtttcgcgaacctaacaggagggatttctgaagttagcggcttccgggatgagtcggggtaacccccgccctctgagcgtgggctggatggatgtctaaccaggatctagggaggatgggggtcgcgggggaagccgggcgcttcggggtcctcgacacccacatccccgcacggcgcacgctctgcctcgagtttgcgttctccgagttagcacggcgagcttgggatttccgtgcccctcttttgtggctttcgagaaacgccggagttccgtgtcctgctgggggttggggggatggagaaaaggtctcggggatcttgtttaaaaagcaaaggcaaacgcaccccaacagctcctcggtagctcccgcggctggcgcggccccagtttcgggcggccccgcgcggggcgtgggcgcgggcgctcgggcggccaggtgcggcgggggcggaggctgcatccccagcgcgccggaatgccccggggcgcgggaaaggcaaaagcagcctggcgctctccccacggccccagtctctatctacccagaacccggcttcaacagcccaaggaactgagaagaaaaaggaacctgcgctgggaaacaggggctcctggcgggctgagtggtcgctgttatggtagagatagaaacggagaggtagagatggaccgctcagccatgccaagcgcgaagcccatccgcccagccagaaagctcggatatcccttgagcttcgtacagttggtgaaaaaataacagaatcaccaaaaaagaaaaaaaaattcccttcgtctgacacgcgctcccttggtgcaaatgaaatgcggagggacacgcgagtcacccagttgcgcaaaaccgcacccccgcggttccctggggaattacttcccccgtggcccaaactgtgaagcctggtgtcagagagtgtctgcgcacccaagatagcgggggtgaaaacagaccccctcgccggttgcagaaacccttaagtcccctaagcaagtcccaccccgggagggagtgccttatttgccatttgggggatcctttcccacaaacctgaaggtgcgggagtctctggaacacccaagaatacactagagtctgggctactaccgcgattgaatacaaatcctgccaactgacagaactggaaaacagggttggtggtggagatacaagaaaaatcatgaacgggagaaaagcattcctatggtagcttgtattttgcttgaaagaaaaatagagaaaaagagccaccagcaggtagatcgtggataaacagcttattgcacttgcctgtaatttccactttccgttatgaaattgtttgtcaataattgcaaatggctacagaaaccactttagtttaccttggtcacttgcttgtgaataataccgtgaaagatctctgtaggaggcagaatcagctgtgtgcaattcattctctggttcttgaaaacgtgtggcttgataattttgaaaagaaaagcttcctccgtcagggaaaatgaaccaaggttttttaaaatgcaatttttccattttagagtcaactacaggttgtaccatgtctaagatagagaattcttgcttttgaataagggatgtggggagaaatagatgacgggaggctttgtaggagacaattgacccggaataaagaagaagatactgagaacacagctgtatactgttccttaggctcaatttgttctgtttggattgtgctagctagttctgccctgttatgcaccgttcgaaagttatggctgcttgaataattctaaaaacatctacatccaaaaggaatagagaaaaggaagagctgagctccagtgagtgcaggagaaagttagaggtctggagagatgtgctcttttcaaagttggctgagcaggttgaagctgctgcggggcttgtttaattggtatttatgcagcaaataacccgtctgacattcacattggcaattgcgtgccaatctttgtgtatgaatgttccattgtcttcagggcacgatgtacagcacactacacacatgtttttttccttccaagtttccttcctaccacctttctcaggtagttagaatgcccatcataaagatgaccttgctttagttggggggagtggagttgctctgtcccagtgtcttaaaagaagatgctgcttgaatttctctcttcctggacccacagccaagacctggccacatctccatgtctgtcaagttggctggcttgcggaggttcaggaaacttgctgttttcttgatagactctgactgggcatccccagactcacaaatgtggttcattcaatagggacggccacttcatgttgttcccaggagaggctatgagctgagagttggctggcttattgtttccatttcaagagagggttttctttctgctaggaattggaatttagatttgggctttctctcttttttctttgattttcatttctacttggtaatttgacaaattgcgacaaactcacccactcactgggagggacgctgagcataatattgtctcatcccaggacaccctttctcagtggtgggcaatgctgttggaatgatttgagaggtactgttgagacgctcctgactcctagctctctgctctggcttgttgcattgctagccttaaccattattaatggtgatatttctttggtaaataaattatggctctcctaggaatcattttgagaatgcagatgttccatttggggatgacagtaatgcatcttcaggctttgatacctgctaatgaatccactcactccctggggagggccaaggtaatgaaagaacaaaggcactgagggaaggaagagacctagttctggggaggtcagcgcagggcagggcagggcaggaggtgaacagaagtaggaatatctaggagagccctcagaggagtatagattgttggacacatgtgttgccaatttcatacttttccaggcagggttatgcctaaagctagaaagctgctggctatttattggctgacttttccagtggtcatgacccagcggtagaagcattatattgtacctacaacttaggaaggtttccggttgtcttgttttcacaacaggagattatcttgtcaccactttcttcagaatagcgatttagatgctcagtgtccatgacctttagttttccaggtcaggcatggtagttccattgacttcttcttgcgtcctttccagttttccttcaagctctgtgctctccatataggcttgccagggttgactttttttggacctgtgaccgttgttaaggtctgactagacccaagcgtgatgagaaagtggttttcttagatcttctaagtacaatacaccagtaacatattttagttctaggacagattgttagactaatagtatccctgtgcattcttatagcacttggcagtttataaagtactttgacacacattatattgttggatttcacaaactgggagatgggggaaaatcattccccattttagaaaccaagaaactgagatctggttaagtgacttgcccagtgctatacagtgagtactgggggaagtaagactagaatcagtgtctcctaggactctagaacatctcactcccagtcctcattatcaaatcagggttagtttgagatccagcatggcctcctgcccccatggggcatggagtaagggaaggaacataatggcagtcctgcatttgaattcttgcctgagactttagacacagtcatataatctttctgttttcaggttccttagatcctgaatggaggctgtgataccatcctcatagttgtattttagagggaaatgaaataatgtgtctgcagctccaggcacactgcaggcaatcagtaagtgttgatgtcacccactttctctcttcttatctgatacatattataaaaagtagcttctcattactttaaatatggtctttttgtgcaatagctgtgttattggaaaaataaaggcacaaattgaattctcctaaatcagatttttttttaaatgcctgggatttagctatttaaaggaaacctgtggtgaattcttctgtaatgcaaataattactttccaatttatctgtttagtaagtcgagcttctcctgtatcagattttttaaaatatgaggctggcttgtgtagaagagctttcacaatcctctcactgatgaaaaaaagtcactcaacttgcaaacaaaatcagttattgtgttcagttggcaaagccttgctctgatgtttgagcataatctcatattcccttattattaagtaatagaatctcagaataggaagctggaagacaccttagagatcacgtggtccatctcactcgtttcacagatgaggaaatggaagcacataggggtgaggggacatgttcagtgttaccagccagtgactgtcagacaaagatccgattccaagcgtctgttgccaagggagagctctgtctgccccatcctcactctgccccaccaagaatccatagacatgcacacatattgcagcatgggagatgatacagaaatacgatgcattttcaaaacaaccaaaagagctgcaagtgtgagcagtcatatgaattgatgagaatattcagcttaacctttttgttaaagagctgaatggaatgcagcataggaatgctgctttggcctttttatgagaaaaaaattacaattcttggataatggtattcctcagtgaggattttaccctatcatattttaatcatacctgctaaatgcccaaggaagatgtgatggcagacccagagagaccctgcatgcgttggtgggtgtgttccacctgacatcaccttgacatcaacctggccaggagacctcatttggagcagaagtgtttggacaaaccgcattggatcttctcagccctttgagagattcagaaatcacctccctggaaatgcccccagattgtcccttcctaattaatatgttagtgttcttccagagctaagcattgaagatgtgcacctttctgaaagattgcagtggaggggcagggccattccctttccttgtgctgccacagtgagtccctgcagcactggggtctttctccaaggacaggacccaccttctgggacagatgactttggtggcactgccacttatcagctcacgctctcaggggttggggccatattcaatccctctgagccttcttttctcatttatacaagagctaatgcctggtgtatgaaaatttatggagatactgtgttagatacttgacactggtacagagaaggtgtgtagaaaataaagcagaattctgggctctggccagtgaggaggtatccttctggccttttaggaaacagagcacatttagggggatacaggctcggggtccagccagggtgcctgcttccaggagtcttaggccaggggactgcccatggagggcccaatgatgtatgatgtgccctgtaagtaagggtgggctggcgggggagtgcacaggaagggctatgagggttcatggttaagcctccccaaagggttccacggcctctccctgtgggcccagacatagtgctgagaggatttgtccccctctgagattggtttcaggagtccagacctcacgcctccttgaaacagtccagcacagtccccgcttctgccacatgtcagaggcaggtcagtttgagagaggagctgtttatactttaaatcaaacacaaaacatacaatagaggtatttggatctatagctctgaaagattgtgatttgtttaaaactcacagactccactaggatgagcttggattaaagctcacaagaattgtacaagagcaagataagtaatttaagattatacaatgaaacctaactgatgtagtttctcacaaactttcaaatatatttttccttaggttttttaaaaggggaaactaaaccttctggcagtggagtctgatttttatgacaatgtatcagattttgaaataaatggaagatttaaatattttataagtagctctgattttattttttaaagtgacaaacgaaattcagtaaaagctcaccaactgggcaaatacagaaagagttgctctgctccagtagaaaatgaattacagactaagttagcaacaataactcctgtttaatgagccagatactatgctttccatgtgtgctgtgtggcaggttctatcacctttacagacaagaaaagcaagcttcagagaggttacatgcaattaattctgtgttccagagacggaaactccagcaaaaattcaagtgagctgtccaataaatgaaactgaaatgaaaccaaaactgaacctctagttttccatttcagtgcattcagccactaaacaaaactgattcctgcctcactgctattcattccccaatctttttttaaaaattaaagctccaaacaaagctatgagatgccaaagagagtaaacaatactgcaattaccaataattttaaaagcgactcaattttattactttctggactgtacagcaagtggaactaggttaatgccacatggataggtaaggatgcattgtgatgaacagatgggctgtttgtatgttcgtctataattgaaagccatttattctcttaagtgttttaagtacttgggggatggcttggtgtaaagaggaaaggtggtcccaagacccatccactccccctagacatttctccttcaccttatttattcatttagtctgtactctgtcagaacaagggtcggctcagccacgtggaattggtctcaaattctcaactagtgatcagagttaatgaggttttactatcatgtgactggttttccttgtgaaactgttaaacacaatcttacttctcttaatgggtggccggtgtaatttatggcctatcacttaaatggtttcatccagaaaatcaggttgactttctgagtgtttccttttgtggaatgcctgaggtcaggctgttattgaatcacagattttctgagggaaaagcagctgctaggagaatccagtgtgagggactaaacagtgaagtggtgagaaaaatcagaaagtattttgggggcagcacagaggaaatctaaggcttaatgtgtgcccggaggcagggaatacttgtcttaggctgcacagaactatctcagccgagtgggccattggctggctaggctgccaggtgtttgctcagaaatatggggcagtgggctgctatgagccctcttttctaatctgcaagtgcaaaaaatgcagctttctttgaaggtgtttgggcatattttcagttatcccccagggaagcaccatctttcctttcggggcaagaaggataaaaagaaaattttatgaactggaacttgaacaagtgaatggaaaatacaagcagatgttggttggctagggtacaggagaactgtccaaatttcaggtttcaaacccatatataaataggttagaaatgagcattagattaaccatcctgccaaagtaaattggtgctgtttattctcttaattagctgtgcattacaaatctcagattccctgtgttaagtcagttctcattttcagtcacatctcttcaaaagtcgtttgaaaaaaatcttacggaattaagggtgaaggccgtaggaaaaaggctttgtctgtagatttgcgtgtagcctttttcacttcaagttatttctagtcttgatgaacttttccccactgagtcaggcaaaattaggcagctcttcaattgattgacaactctgatttgctcctagtgattctgggatcaaggcatgtttccctcagaactgttaatatacccattgctcccacaccgacaaattaattggaaaccctgacaatggtaataggaatatcttcacatgtcaccttacctgtgtgtttcattttcaagtctttgttttcttaccagagaataagacaatttatatgaaatagctgactttctatgttaattttttttcacaagctacaaaacttacacattttttagctctttgggtggatttctttctctctttcactttgtaattgaataatcactttttcctactgggtaatttgaggcactaaaaaaaaagtcattaacagatgactggcttgttgaatacatcacagaaaataatatttattatgattttgttgacaaaattagaatgctaaattcagatagctgcaaaaaaaaaaaacagatttgaaaagaaatggtgccatcagttgcaggatttttaccttcatggaaataaggtttattgaaataagatgataaataaaagtgctttctggtttgggagaatcaacctacttcctgatactgttctgtttctcttgctccaaaaatatgatcaatctccctgtttagatgcagtgcagccaggtgttcagaatcacagggggacaaaaagaattagtttcttactgaataggggattttttttttaagaggctggcgtaaacagggctgcaaaatgtgaaacatgtagacccactgaactgaacccccttttttcccctcttcccaggaataattctgctacaaggctgatttcaaggacatgaattgttgacctcatcccaacatcagaacctcagatgttctaatttttgcaccattccaggcaagttgatcttataaggaaataaaattgaaccttaggggtctgatggaaattcactgtgacattcaaatcaagaaaacttgctaatgcccacagagccttttccccatgggccctgatggtagcctccagaaggtgcagcctcaggtggtgccctttcttctgtggcaagaataaactttgggtcttggattgcaataccacctgtggagaaaatggtatgcgagggaaagcgatcagcctcttgcccttgtttcttcctcttgaccgccaagttctactggatcctcacaatgatgcaaagaactcacagccaggagtatgcccattccatacgggtggatggggacattattttggggggtctcttccctgtccacgcaaagggagagagaggggtgccttgtggggagctgaagaaggaaaaggggattcacagactggaggccatgctttatgcaattgaccagattaacaaggaccctgatctcctttccaacatcactctgggtgtccgcatcctcgacacgtgctctagggacacctatgctttggagcagtctctaacattcgtgcaggcattaatagagaaagatgcttcggatgtgaagtgtgctaatggagatccacccattttcaccaagcccgacaagatttctggcgtcataggtgctgcagcaagctccgtgtccatcatggttgctaacattttaagactttttaaggtaggtaaaggcattgtctttctgaccattgtgaaagaacaatgaaatgctatgactcctactgcaggtttaagaagaaagtgaagatggtgaaggtgctcatagacccttttggtgttaccaggttcctcaaatgggacattctatatggggcattctacatgtattggtttagttccattacttacaattaactggattaattttgactcttttttttttttcctgaacaaagagaaaggtgaaaagttctgtgatatattgggtccttgtcatcttgggataacctctttgttaggctcattttaaattaaacaagcatttttgaagagaataatgaactcagcgcatttatcatggaaaacatttctatggtatttgagctatttaatttactgagtgaaacttctttaaggtgggatgctctgttatgacaaaagtttgttcatgaagaaacagtatttattactaatgtgtagatgggagtgacactctgggagatgagatggtcataaaattgtcaggcttattataactacaatagagcagaaccttattaattcagactgctctgatacagacttggaataattatatataattcttattgcattaaaagttcaaatttagcaggataaattagactttttgatttaggtttggtgatctattacccatatgttgcatttacatattgaataaaattggaaatatggaataatatatgtaaaaatactttgaaaagtataaagtgcagtaaaaataaagttattgttaactcaccattttcattaactttctcattttatttattaataaccaatatgtagtcttttgtaatagacataatttgtttaattgaaaatactttcactctggtttcttactcagggggacatgaatttttcaacttaatctgaattaatgagcctttgttttatattgtgaaaaatggttcctggctgggtgcagtggctcacgcctgtaatcccagcactttgggaggccaaggcgggcggatcatgaggtcaggagattgagaccatcctggctaacacggtgaaaccccgtctctactaaaaagatacaaaaaattagcccggcatagtggcacacgcttgtagtcccagctacttgggaggctgagggaggagaatcgcttgaacctgggaggtggaggttgcgatgagccgagatcatgccactgcactccagcctgggcaacagagcaagactctgtctcaaaaaaaaaaaaaagaaaaaaaaaaggtcctatgcacattagatttagaaatattaaaagaatatggagaagttggacagatgacaggtattgtgacaaatgtgaacaaagtgatgggaaatgtcacacaaaagatgaaaggaattgaatcaaaggatttctggcttggcagatatctcagaggcacatctagtctggcccactcatggcactggaatcctctttgtaacacccccttgagtggctgtgcagcctctgtatggatttccctagtttagaagagaaaatggtatgaggcaacttaatggctattttcagatagatgaaattttctcaaataaggaggatgctaagcagaagctctctgcgtctaaggagtactgaagaggcacaaacaggcttcagggtgtgctggagacatttgagcaggacattaagaagcgcctcttgacagtgagaaggacacaattaaaacatgtagccagagttgctctagttctccatttctggaaaccttcaagggaaactaggcagttgttaaccatttctcttagtaagagggactccttgcttagagggaagatgtggaaccagaattctccaggcttcctcccacatcttgggatctagtattcctcccagctaccccggttctgtgccatatggcattttctgctctgggttggtgtccagctcagacatttctgtaactcttctctctgatttgaactccctcctcacctgctccaaggcatctcttttctatttttaacttagcaactgtggttcaaaaacatcacttttagaggagaggaaaagtttcctaagaatcttctccttttggtttccctctccttataaaccaattcgggttcctgtcaataccattgtaattcctgtgaatcctggctgtttcctgtagcctggtgcccagccaaaagtgggcaaagatttgaggagtgtggtggaggagataaggtattcatatgaggttttccaagcttgtttgcattttttttttttttttgccatagaatcagccaatctgcaaaatgggaataataagattgtgttagattgttgggtatatttaatgagaaaatgcaggaaggcttccatcaggacctggtcatgtcctttggttttttgggctattgaaggaaactccaggccacctgaaggcaagagggtgttttgtttttatgcagcggggatctggcttctctcttctctattcttccctcactgactggttagttctcttaatttcttgggtaattctggagggaccccatctgactgggtgagagggttactactgactctctgggcagagtccaatgccccaggccatctcttgagacacccaccaacacatgaaagggcagctcttgctacccttaactgaagtgcagggagtgggtgggtcacttatcgccaggagggggtgctgttatggtagatgtcatgactaacatgatcggttcactggtccagagtgcgcgtttaacctacagaagcaaatctagttattaaccaagttattggacttgaaaatcgtctgtaattcaaaagtccgtcagtgagatgtcagtgcctagtccatcttacaggtgattctggaaccataagaatgtgaattagataatagcaacttatgctactttagtttgatttttatgtgactttcaggaagcactccatttgtagtattaattataaagcaattgggatagaaaattgtctactctatgtatggatgacttctgtttatacatatatgctaggatggacatgaaatattagaatagttatcagaggaatgattagcagttaatgcattggagattggcatatagctcctttttgaaaaataatacttttcttaaatactaattttccaaaggttatgacttgagtaaaagtaagttttaggacagttttctcaagcttaggccctttcagggtagcaaaagacccacagaatctaaaaatatgcccagaaattaatgtattgctagttattcccagataatggagttaaagaaggtagagcatctccactgaagatatgcaatgaaccttgatcataaggaatacaaacagggtcttaattcatgaacttactcactgtcctactcaacaataaacataaattggggttttaagaatgtgattgcgatgtgtttaaaattttatggaaaatatttgggccaaatttggaagtgatccctaaatgtctcagtttcctttttttggacaactttaggaaggccatgtattttacctgcagtatcttcctgaactaaaatgtgaaggagacaacatcttccatgcagccccatttaccactttcttcagtcttgctcctcctgtgtcagcctctccagtccttgtattcctaagtgttctcctaatcaaaacctgatgcaagggatctaggtgttgtcagctatctctatgttagtatgtctgtgtttaagtcagaggagcattttatttccttcaggatcactaattgtggaattaaatgggatttgtctttgcaaaggagatgctggcatcagttggggaggttcatttagccccaacagagactgcacttagtggatagccacctcctctgctggaatacaggtggccctgctcatctgacctagagggaagtggtgtcatcctatctttgtttcttttcttatccaagctcagaagcaaatgaaaaaaatgggcctctttaactttagaagagggttgaataagggcctggagctggacacaacctgggaacagaagatgccatgtggcgtagatccataggatactgaatgctttactagattagtgatactcaacctcgagtgtacggtggggttcatactgctgttgcctcacccacaaggggtgtgggctgcattattaaaactacctgggaggcttttcgaatggcaggatccagtgaatgatgtgtgcctcccaagcccctctctgggaactatttttattgagatgagtgtctcatatccctcaggtgtgttgggagtggaaacaaatttgagagttacagaacaagaatttaatgatctgaactttttagatgcactagtgtaccctaacacacacacacacacacacacacacacacacatgcacacacacatcgtatatcagctaacatggggcagagcagacctaggtgattgcttcactcatataacatgctaatggctttagataacagaagtatcaattaggataatgtgacatgtaacggtagaatagcagacccagaacagctccatcctatacagaggtataaacgacacctcaggggcttttgtactgcagacaacccagtgaaaagaggggtccagctccccataagagattgtgtagttttgaaagaatttaaaaaggagagggtctttggaaatgtttgagaagcccataaatttgtgttttataaagagctcaaattttttctcctttctagaacatttcctctgctctcctttaaattaaagcaaattgattactccaaacactaatcatatgtcttactttgagcaaagattgaatattctaagttaaaaatagcacattgatgctggaggtaactcacattaatgtccacaaagatgcactgggttgtaagaggacactgtcaaatataattcctctctcttttgtttttctagttaactttacctggattgttaattttctacccttgaaggataggggttagatagtctgtagtgtatccttcccaaagcaatcaaatgagacttttaaatagaaatccatttgtgggtgggctagataatttcaccctatgtggaagtgtgctgattataaatggctaaaattgatcttcatgtgaagtcaatgaaatactgagaagcagcttgtttccctggcagtcttcgcctaccctgctatgtttatgaagatatattttcttccaagagactccaccaattgtagcaaccacttctataaagccaagcatttttttgagttatttattgcatacaatgggttttattagcttcaaaactttgaaaaggtaaatctgccatatccgggctcatctagagatgaactcataaatgagtgcagtcagtaaactcagtaggaggtaaatttcatgttcaatctcatttgatggcaatagataatggaatattgggagatggacttcttcagtcaactctttggtactgtagcagggtttcatttaactttgaaaagagctcactctccttaggtgagagaggactggtaagtagcacttaaactcccagctacagagatctttcaaaatggagacttggtaatctctttccccttcttaaaactctttaatggctagggttttacccaggatgaaggtccacttccactttggggatccttttctcactttccttgactagattgtctctttgttacaagtaacaagcagcttgtgcttcctctccttaatgtctctctcactgggttgtagttgtttacctacttgtctgcatcccccactagactgtaagcaccatgtgggcaggggcatgtctatctagtttgttgctgtattcctagcacctagcatgggcctgtcagagaaataatgaatgaatgaataaatcatatctctctactctctccctcatcccaatctcaatgttggaaatatgtgttgaatagataggaaagaagtataattttgtttatttttcttgtatactcctttagaaaaaggagggcaatatgtttaggctttgtgtccccacccaaatctcatcttgaaatgtaatccctataatccccaaaggtcaaaggagagaccaggtggaggtaattgaatcatgggggtggttttctccatgctgttctcgtgatagtgagtgagttctcacgagatctgatggttttataaggggctcttcccactttgtttggcacgctccttcctgccaccttgtgaagaaggtttcttgcttctcctttgccttctgccataattatgagtttcctgaggcctccccagccatgctgaactgtgagtcaattaaacctctttcgtttataaattacccagtatctggcagttccttatagcagtgtgaaagcagactaatagggagaagcggagaaagaaggaaacatgattatattttgagagttgctattttcatgtgctttctctttttcctacaaatttccatttaaatgtatttttaacattaagaaattgcgtgtatatttcaaaattgttgaaagagtagatcttaaatgttttcaccatacaccaaaaaaaatgtgagatgatggatttgttaattagccaatttaatcaccccatattgtaaacataaaccatcacattatgccccataaatacatataaattgtcaatcaaaaataaagtaaaataagcaaaatatatgaacacattctcattttggaaggtttaagcaatacatagtatgaaaggaaagtccacttccaaatgcataaatccgttaataacacatgcacacatgattttattaacagatatgtgatttatgactttctttttcacttaatatgtttgggaaaattttccatgttggttaatacagatgtactgcagtaattcttgatcctggctgcatgttagcattgccagcatagcttttaaaaattatggatgcccaaaccctagccaggaccagttaaattggttggtgtagagccctgcattggtatgttttaaaagatcaccaggtgattctgatgtttggtcaagaatgagaactgcaggactttatttttttaataattgcttggtttttaatcatatggatggaccatactttattttacaaatctctgataaacaagttacttccctttgctcttcaaatttgttttttgaaaaacagttgaaacaatgctagagcctcatccgaatactattagctctagaatgaattttggtggtgtagggccctttcttggaccaacaaaggggccagatgagtgaattgctgaaagcatcttgctgtaagacagggtcacaggacacaacattccaagtcatgtctcttcgaaacatgcaataacttagaatcagcatggtggtcatatgctcagacagttcagggagcaccatgactcttgggcggagcacattttaaacttggtgaatttaaatttcttttctttcccctagccttaaatggcctgaaatcctgaagtgaataccgaagacatcttaagagcgtgcttttagtgataaatgcctatgtttggggtgttttaaataatgaggttgtttgaaaagtagtgagaagtctttccataagaatggtttgtgactggatgttatatattttggtttacaaaattgtctgaaaacctttctagaataagtcagggtctatgtaaataaatctgcataaggaaagtactgtgctctttctacccattcaccctagagactgcaggtttttaaattttatggacttcacttcagagcagttttaggttcacagcacaattgaagactgcagcggttttaacacaggtgtcttcctgggctcttctcatagctgtttgcaaccaaaggtaatgccttcctaggaagacttaaaatctgaaggctgtcctgtgctcagtccaatggttatcacactgtagcatgcgagaaatcacccagagtgcttgttgaaacacgcgttcctgagcccacctgcagagtttctgattcagtgggtccggggaggcccggggtggggtctgagaactgccatttctaatggttcccaggtgatgctgatgctgctcttttgcacatcacactttggaagcactgctccatacaaattgcttgctggctgacttagcaagtcaaagtgtgcaaaacaaaaatgagatttaacagtgttctgtctggcagcagcttttttcttttgacacacacctggttggatttctgttcatattggtcataatcacagcagctgttgtgtggatttatttttaattgtgttcatttttgagttgtgttccttattaagtaatgcatagctcatgaataatgatcagtgcaatggtcacttaaacacaatttcttaaagtagggtcaggcagattaccattttacacatttttactacctgagacagtagagcagactgatttaagaaacttagattgtaagatatacattaattgggaattgagaacagtaaaagatgaaagaggctatgatttgtctcagctaccagcaatttgtcttcagaaaccatgacagctacctcctgatttccattatgcaatgagattgcaaataacattccacagcagtcttaatcaatagagggtcacaagaggcccttgcttccccacagtgggaaaagggcttatttacccatttaattgatataacacactttctggcaaaagagacatctcttttagctgtaattgggggcttttcctatccccaaacactgtcctcacaacctgcgtctacacatctaatctttatgtatcttgaatacataaggaacaccaggctggcaaggtgtaggggtctaggcatagcattgtgcacagccactgttatctgtttctagaatgaggtcagtctctgctgtattacttcattaggctcagcaagctaatagacatgtgttctcaatgttggccattagtctccctctaagacgcttcaaggctccctctgggattagggaggctggtttccttggtgtaatacagccctggcttagtcccagcttcagggacaccatggatctgtctctgtatctcctgcagtgccactgaggcttctttgggacatgtggatggtgacttattcttgctctagtgtcttactcttgcttcctctcacatggattgagagtgacctctagctttgactagtgcttgtactatttctttatgttgtggcaattttatttgttagttttcagagtgatttatcgtctcatctcagagtgtttgaacttatattatttctagaacaaataccatgtcatactgatgtaaatttcttagatatttgcgacttatagatattatgtttgttattaggagatgtctgttcaaattatagattattttaacgtatttatctagtggtgctgatactcgtgagtaaaatagattaatatgaattatatgaaataggttgggctctgtagtcagactgcccgagttcaaactttgacctaatgcttgttaactgtgttaccttaagcaagataatttatctctctaattcttaagctttcttatctgttaaacaacccaggctgggtgcggtggctcacacctgtaatctcagcactttgggaggccgaggcaggtggatcacaaggtcaggagttcaagacaagcctgacaaacatggtgaaaccccgtctctaaatacaaaattagctgggcatggtggcatgtgcttgtaatcccagctactcaggaggctgaggcaggagaatcacttgaacctgggagacagaggttgcagtgagccaagatcgcgccactgcactccagcctgggtaacagcaagactctgtctcaaaaacaaaacaaaaacaaaaaaccccagttaataatagtacctttttcataaggtttttaatgaagacaagtaagatatagttcagagtcctaagcaaaatccctgctccataggaggcaccataaatgtttgttatgatgatgataatgaggaggaagatatttacatctgctattaagaggatattcattttgagtggtacctctcctccagtttctcagccattcagactgacttgccctattttgtgaacaaaggcagattagcattaaaggtatagtcattggtcaagaaacagaactgatgggccaggtgtggttgcacacacttgtaatctcagcactgtgggaggccaaggtggatggattacttgagcccaggagttcaagaccagcttgggcatctgagaccagcctgagcaacatgacaagatcctgtatctataaaaaatacaagaattagctgggtgtggtagcatgcccttgtagttccagctactctggaggctgaggtgggaggattacttgggcctgggtggttgaggctacagtgagccatgatcatgccactgcactccagcctgggaaacagagtgagaccctgtctgtctgtctgtctctctctctctctctctctctctctcacacacacacacacacacacacacacacaaagaagaaacagaactgatggcaggtctagattggctctggcatagggcaagcctatctagttttcttgaaggccaaacttgagactaggacttcatcagctcatgttccagccaagtgagctaagaaggtggtgtactgctatccttccaaatccatgtgttgggtggtaagagtcagttttattcaaaaaatggaagacccagagaaacattagttttctatttttttaaataaagttgcagtaaattttaatatcgtttcagcgccaaaagaaaaatacccttaggattcaattgtttaaaaaaaaaagaaaaagaaaaaaatcaccaattctggcttacagaggccacaggtttgatggtggagttgtggttgagcatgaacagctgaataaccccaggggtgggtggcagccctcaagcctgtcctttgggttggaattccctttcttttccatgtgtggtaaggacagaaacacaggcctgcaccagatgaagaatgttaccttttgttgagggaataatttttttttctgccagagatggctgacatgacactaattcctatcatctctgatacaaatgtcagaaatgaaagcactaaaaggcttcagaagtacttgttctagaagtcacattcattttaggacaatcagaaaaacagtggaactaaatgtattctgattcacactatgacctatcttgtgccacctgtttaaaatgtgactaattcagtcaaacatatcaattatgccctagtaaattctcatttcaatcaaatatggataatttgctcaaatgtaaaaggacttcacagggaaagaaatcagtgcagagtttaatgtggtctagtcctatcctagcattgtgaggcagtgctgaacagtgcctggtatagcttctaaacccagtaagtgctaaatcttttttttttcccccatcaagagaagtagaatagtgtaagagatgctagcatttaacccacctattctccttctgtaacttagtaatacaggtaggcaggtgatattcaatcaacccaccaacaggtctatgcagcatcccataggtatatgccgcatgttcgacattgtagtggataatatgaaagaaaagaagactctaagccatcaatgttacttgtactgtagttgaggggaaatgaccaaaatcctgtaaaataaccacgagcaatataaaaccgtgtaaaaagggctacagtgtggtcctggggtttaaaagagaggctgacttcatccaaggaagctgcagttatcagccaaggtttctcaatcagctctgttataggctgctgcaacagaataccttagactgggtggcttaaacaatagcctttttttcccctcacatttctggaagctggaattctgagatcagggtaccagcttggtgggttcttggtgaaggccctctccctggtttatagatgctgtctccttgttgcatcctcacatggtgctgaaagagataagaaaagctctctcctgtctctccttgtaagggcgcttacaagggctccacgcttatgagttaattacctcttaaagatgccatctttaaataccatcacaatgagggttaggatttcaacatgaattctggtgggggatacacattcattctatagcacaaggcttcatgcagtaatatgggattgggctgggctgggcttaaaggaatggataggagtgtgcaaactgagaggccgggagaggaggaagagtcttccaagactgggaatcctgtgaacttttacctgatgccagctcatgttcagctatgtgggggtggaagtatgtggaaacctctttccctctcacagcatctctctgctatgacaaaacttcaaaggattattttaggagtctctaggaggattaaaaatggggaaggttggagtgctgtgttcccaacttccattggacacaaaactgggggtcccagtaaaaacccaagccagtgagcacagagcacccagagggcacaatgctgtaccctcttaatcagcattgtagaacagctaaacaggggtgaattgctgttgaatttaaggaaagtgttatcaaacctaggagaatccctccccccaaccctttccccatccgttgcactctgggaatccatgtaactcaggataaaacattttgctttatttttcatttgccacatgcatatcttgactgtttacacggttatcattcaatgtagatacacaattaattgctaagaaagaaattaaatgcattgtcaatgaatttattttatttacttcattccaataagaaaagccaccattcttgaggggctcacggttcttttccattttcctaacccttgagtatacagggagtaatcatacctacactgtctcagtttcaaaaggtggtcgtagatctcagcaaggtaaaaatttgagatttgacaatattccaagtgtaaagggttttgatttggaaataaattctgtattgaaaatggcataaatgattatttttcttctttatgctgcagcactttaacttgtaatttctaccctggttaaccccacctatttaaatgagagctcaatgtgagatcttttgttgcctttgaaaccactggatagaattttaaatccttggatatttttcctctgcctgagaaaggaagatacaggaaatttcattttttagtttggatagctttatttcatttatattcatgtagcccaggcatctagtgagttttgctggtgtataaattaatatttacaggtaaaaccttgctgaaaataaaatagattaagtggagaatgtttttcccacagctttcgtctctaacaaaaatgaaaaaacccagcaccactcctttaccgaatgccccatctgtcagctccttgctgctctgagccaacatcctctcgggattgtttggggccaagggtctgcatgtggagcagggtgggtttagcacatgctgggagaatagggattttaattaagacttatatttacccttaaatatttctgtgaattatggagaactcaaattaaaacctgtatctttggactgaagttacagtaaaatttcagcctctgctgatcagtggtatgcatagtatgtgataaattttttcagatattaaatcactgatctaaaatattgtagtggtataggattgatgaataaatattattttaacaccttatttttaaaaaatgttatgatgtttaaattaatagcgttaatatttcattccagtaaagtggtacaagtttagattttgaagtaaaatatctgcatgataagaattccctcaaagaatctatgcccatctagaaaatggttcttatgaaagaagacagttttgcattgtactttgttttaaacaacctagaatgaagttctagtagtagagttccatggttttcaaataaaatggataataccctatgattcatggatattggacattttaaagatgttttaggaagcttggcactaaatagttttttttttaagtgattatttttcctaattctccaaatgcctggaatcatgaaaccttagaattggaagagacttttgaggttttcttctatagcctctcatccaaaccaaagtctattcaagtaagacccttgataggtggtgattcaatgctgtctttgttcttcgatttgagttaaacatctctctgctcaattctcctgtcttgtgcatctctttttcatgagacagtccttcaggtgtttgaagaccccgttcttcctgagccttcagttctccaggctaaacatcacctgctccctgtaacagaaacagtgcaagaggtaatgtttattgacagcttcccatatgccaggcactatgctaaacatgtaacacgcctgatcttattggatccttacaacaattctgtcagataggtatggttttcagatgaggaactgaggcttatctaaggttacatggaaagtaagtgggcatgtgatattcaaacctatgtgtctgatggactcaaaagtccatgctttcaaccattgctttttactgccttttagatggtatgttttcaaattatttctgtatggtttcctttctctaaacacagtcctgctgttagtttaaccccattctaagttaaaataatttttccttgctattctaaaagactgcctttgagcaggaaaattaagccttttaatgcagaagacttcagctctgtaagcctcatactctccgtatatcgctggctagaatggcagatgggctggccagcacacccatggtgggcagtggcctcagtacaaggatggagtctgactgcctgtgaccccatgtatcttccctgctgccggaatgatcacatggcttccagaaacgttgtgttcctttagcagcattgatgggagcttcctattgttccagatgttttctgaggaggatactggataagagtttgtattattacagatggtcagagcagtttatgtatcaggaagttttccatggaaggaagaatatatccaaaattctattttgaagctgatggcaggatgtggtgaacttatttggatgttagggaaacaccgtaaacaccaaaataaatacttgtggtttgcgcttactcctttcccaaactaaaataggacctgtgacagcatttcctgaacacatgagatcaagctctagatcaaatgatgagttgataaaatgaacatatttatattaagcttttcatttgcttctcgtttccatgtctagaatctagagtctagaatggttggatggatgtattaggaccagggtgtgtatgatattatttatgtccgaagaacaaactactcattttcacctctgtggggagagactggagttctaaccatgtctcctgtaccttggcagaggaagagtattgggttctttcagccacttttttgggggtggacttggtcggcagcccgacttatccatccttgtcccagtttcagagcctcccagtggcgctgctgagttttctcccatcactacagagtccgcctccttcctctgttaacccttgcgattcctttccgaggctcctttaacctaaacttaatgtatttgactctacctttactttgaaaacacttttgatcttttttagagttcctctaagttttcctattagataaaaacagctttttataccttttgtttccatggtaatgaattccaggactgctttagaaaaccactagctttgtgtgccagtggaaagttgcagcattatgtactaatacaataaacatcagcccacccgtaggaggcgtgcaagccggtagaaacactgtagcaccacagtcatgaaatgatgtgagcatattattttttactgcaaaaagcagaatttggaacatgagccctgcattgcaggcaaatggtttgggagctctagcatgaattctagtgttcactaatcagctcaagacagaaagagccaaattaacttgaggcgttaattttcaaatttaacgttatattgaaaccatggaaccccatttccaatttttttgcaaccttcctgagtttttacaagtgccagttctgctcttaggaagtcctaggtgggagaggcttccttgggcaatttactttttggtgtaaggaagattgtttccaaaaaattcagggaaatcttcctggttttgtctgcaaatatacctcttaagaatctcaggtacagatcagaactcaacagaaaaatctattagagttggctaaagacagggcaaacataaaaagtagatttcctgggaaaaaatcgaaatatttttataaaaggctataggtttttgaatacgtgcaaggagaaggaataattggaatctgttttttgtcaaccctgactctgccctctacagccttctctttgttatatcatgggctgggggagtgagaagcaagagaaaaggcagaaagaacatgagaggttggaaagaaaggttagaggtgtgtgctaagttgattgtgctaatttgaaaagagacaatgaatcaaagctccttttttcctattgtagattttaatatttaaagttaccagtgccactactgattatattaagatgcttttatgttgatctgattaaaattacatttgaaataatgaatgacatgtaatgtacaaatacccttatatttggaataatgaatgacgtgtacaaataccttcccagatatatgtattttttaaagtgtaaacattatcaacaagtgtaatgaaagtttttagaagcattcttctaggaggtacaaagttaagggtctagaaacacagcagcacacggtttactacaagactgtggggctatcttcttgcctggaaggattcaggactcctgtccctaataaaattaaagggaggttctctggaacttagtatctgttttgtcttagtatttctaagtcagaaaatgcctattataaaatatctatataatatatagtatatatattataaatatataatctatctattataaaatagatattatatctatctataggtagagtttaccaacgctgactgatttgtacccagctcatttaagcgtttggggcactgctccaaattgttgcgtttctttcttccccctgacctagctgcatcagatcattctcaaagacaccttagttccattttttttttttttccagcagataggttgcacacaaagcatagcttttggctttttgtaaacagagtgcaaatgtactgttctcccccaggagggaaactccaccatgctgaaggtgagctgagaccctgagccttgacaaggagccactttgggtgtgctggcaggtcagcctgcgggctttgagaagagccttccataagcaccagggcacacattcaccaatgcaaggcaaagctctgtggaaaagcctggtgggttcatccctgtcccaccctagatgtacccccagaacagcagaaatgactgtgctccccaccttgtgaaaagggtctagttttaaagtgaccctggcagaaggaggggcagatgcctccattcctcctcttcagtttctccttggaccttttcctgctgttctgtgggttctttgagcattttatagaatccaattttgatttatctatattgctttagagtgtatcttttgacatggctttttaaacatgtagacatacatgatttatcattgcctactattattgtcattttattaggtccagcgaagtatagaaacctagacatgggccaggcacaggggctcacacctgcaatcccagcactttaggaggccaaggcgggcagattgcttgagttcaggaattcagaccagcctaggcaacatggcaagaccttgttgctacaaaaaagtaaaagaaaaagaaaattacctccctttacccttccaattatatgattgtcttatttcttttgcataccttgagaactgcattagacagtgttatgattttttaatcatcaactgaatctagaaaactcaagaggagaagcaaagcaaactcgattgtatttatatatatttttgccatgtttttttcttccttcctgatgttctgagacattctttcttttatcttttcctttttgtttagagaacttcctttagtcattattttagggcaggtctcctggtgacaaatcctcttagtttttcttcatctgagaatgtcatccctgaagaatattttctctggatatagaattttggattgatagttctttctttcagcacttaaaaaatgttgcactgcttcctactggcctccttggtttattttgcgaaatcctctgtcattcaaattgttcttcccctatggcttcatgcatcatttctctctggctactgtcaaggctttttcctttgtctttttgtgggactgtgatgcatcttggtgtggatttctttgggtttatcccatttggtgctcagattcttgattctgtcttttgccaactttggaaagtttttagccattatttcttcaaatgcttttctagccctaccctctttttcctctccttctgggagtcagatgacctacctttaacatcttttttttgtagttcaacacgtctctgaggcttagttcatttttttccccagcctaatttattttgattgtttatgggtaattgttttatctgtaagttcacagattttttttggcctctgttctctttattctgctattgaacccatccattgagtttttttttttttttttacatttcatttataatatatttcagtcccaaagtttctacttggttcttctatcttctgtttctttgctgatacttctcattactttgctagttctttgtagttttttgtttcaagaacatttatagttgctctttgaaacccatatccatctggctgccaggaggaggagtcctgttatggttctccatgtgacctccactcccacggttggaatggcttcattactgctgagtggtggcgggtaagacctgattctccaccagcctcctctgacacctttgcagccacattgccacctagcagagatgaaaggccagcctccacactcagcctctcagaaactatcctggtggaggtgttggggctcctcactactgtctaggttccccactaggtctttgcttgtatgggtgggtccacagttttgtgtgtgtgtgtgtgtgtgtgtgtgtgtgtgtgtgtgtgtgtgcgtgtgtgtgtgtggtgtgtttcgagtagagtggttattatctaaaagttttcatttttttcttcaatctaaaagaagctaggctgcccctttcctggttctttggacaaagagaggagctttttttgcttatttgtttttggtctatgtgtattggtgtttccaggttgctggcttttcaggtatagatgaggaaatacatgagggaaaaagaaaattcaggaactcgttgccatgtcattccctgggtcctgaggtccttaacccacttggcagctccccacctttcggtgtcttcttatgcttgttttagatctaatgctcagtttttagctagacttatgggagaaacagggaagagaacatttactctgccttcctgtcaaagcccctcttgatccttacatttgtctacaccagatgctcttcttcttgttcctctctcaaggtcagagaacagggtgtacttttgagaacgtccattaattcttgtacgaagcttagcttggaacaggaactgctgcagggtagaaccagtctcaagcactggagaacaggaggtagaggtggtgaagtggcccagtcacttgctttgtgggtagacagacctgggttcaaatcctgtttctaccatgtatttgttgcttaaccttgatcaagttatttaacttctctgaccagtattgtccccacctgttgcaaggattagaagggacatatttctggtgcctggaacatattgggcactatacatgaatagccattattgttacaaagcaggttataagttctccggatattttgtcaataatctgatctctgctgtgaaagaaaccagtgcaaactcattttctaggatgctgttttatgtaaacaagtcatagttaaataattactccagagtgacaaacctttttaattttgtatccagataagaacatcagttagaacatgtagcaagaacagtgattcctctgagaaagtagggtagagtatcttcaaaagcaatgggtggcttgttggtgatttatgttttgagacagggtattaccctgtcacccaggctggagtgcagtaacgtgatctcagctccccacagtctccgcctcccggttccaagggattctcatgcctcagcctcctgaatagttggggccataggtatgtgccaccacgcccagctactttttatatattttttgcaaagatgggattttgccacattggccaggctggccttgaactcctggcctcaagtgatccacctgccttggcctcccaaagtgctgggattactggcatgagccactgcatgttggtgatgttaatgctgtaatgaaaaccctcattctctgtttaagagatttcaccatttaagaagcaaattaagggacactgtgggggcatttctctgctccctaaggagcaccgaagactaaatattttagggagtgttatgctgctgatgacctcagcttgatgattcactgacttcagagtttctttcagatcctaactacaagtcaggtgagagcttgagagggcaggagggagggacttggtgcttctctcaggaggaagagtggacttctaggctggaagggacaagggatattcctgactgagggactggattgaatgttgatgggctctggataaagattgtcatggaggccatttgagcactgtggggcctggaccagtatacttgcttggaatgctcagagagaaccccagtgtcaggttagattccctagaagcagagctgaatataagagaatcttagcaaaatgagttattaacgagcattctcaggagaaaggatgcactttcaggtgaggcccattctgagcctgatcctgtggatgctctgaagcatcaatcatagcagggtgtgttcttccttgaggcaggaaagtaggaattttgtatctttgcatcaaccagtcttgagctacgggcaacctggtcctaagtgataattcccgggcatacttgggcaaggtggctatatcacccaagagtggttctctcgagaagattagaggtgtgaggttagcagtagcactggtgacaggtggaaaaggaatactgggcagggctcaacggggtctacagccccaggcttcatcggtggtaccatgtgaaaaccactggcctgggtaacaggaggcttggcttgtactccttaattttctttatgaccttgagcaagtcattcagcctctctgccttacatgtaaatgacaagattggcataggtagacttttaaggcctgtttgactcaggtgagttgattgagaacacttgatttagtaagagcagggcttcctggcctatggttggacaataggaaccttcaagaagagcaaaacagggaagtatgaagttactgctgcatggctagtggcccaggcaggtgactttggggacttggaagtgaagaggcttccttaccttgggggctagggaccagaattatacctgcatgggccaagggtggaagggctgcatggcttggtgaccaaggggacaagaaggaagaccatgtgaaggactgagcctagaaagcagattctgggaggagccaagcttgcctcagtggttacaatgggatttactctggtaagaagtttgactaaatatgttcagcggctggggcacagtggctgacacctgtaatcccagctacttgggaggccaagatagggggagtacttgagcccaggagtttgagaccagcctgggcaacatactgagacattgtttctacaattttttttttttaaaattagctggacatggtggcatgcacctatagtcccagctacttgggagactgagatgggaggatcatttgggcctgggaggtagaggctatagtgagccatgattgcaccactgcactccagcttgggcaacagagtaagaccctgtctcaaaataaataaataaaacattaaaagaatgtgttcagcatctgaacttcagctttttgtattctgtcaacattttttcttgattttcattccattcttcattagatggaaggcttattaaagatcctttttttgtaatttggtaatgttattagtaatattttaagataattccttgacttgatagttcttttactgcagcttttgccctggtcagtggaggaggcatatgatattgtattttcatatatgtccatgtgctggaactggacagctctgggggctagtgagaaaagataaagttgggaagaccttagcgatgtcagtcctggagctgttcgaagttagtggagctcctccctctactgcagacagtttccttctctaggatagggtttctgatgagaatatttcattgttctctaacacaagtagtcaatgttttgctcagtttctcttgctgaaataatggtatagattcagtaggttggggcggtaggaagattccagtttggtgcagcaaaaggaaagtcttaccaaggagtgaggtgcttgtttgctggctcctgcaaagttcaggtattgctgagtgggtagatcttttaagaggaggagtctgtttgctcccaggtcagcagatccgtggtggtctgctggggcttgtgcccctcagatgccttgtctcccctgggtggagcttttggggtgggtatagtggttcatgggtacatcgctgaatttgcataaggctagcatggcaatggactctcaaaatatctgtggtcataaataggaacttacttaaaattttaggcctgggcaggaacatcacttgaggccaggagtttgagaacagtctgggcagcattgtgagacccccacctctacaaaaaaataattagctgggtttggtggtgcattcctgtagttcagttgatcaggaggttgaggtgggaggaccactggaacaggatttcgaatctacagtgagctaggatcatgccactgtactccagcctggatgacagagtgagaccctgtctcaaaaataaaagaataaaatattatgcattactctaaaactagttttatttacaacgaaaaagtaattttaagtacctccttagaagatttagtaaaaatatgacctatggaataatttctgtcatgaaagacaaaagttctttactatatttctatcttgaggtaactattgctgtatttcagtcttgaggtaacagctgacattctcaggatgtggcttccttccttggctgagatgtcacctggacagatacagatatcaccatttgctactaatgatgattgatgttgtaaaaaaaaaaagttcttctatgtcaagagggcacttggaaagcaggccataaagagcagttctcaccatcggaaagcatttgttatcactcatgcttttatgtggcaaacacattgcagttcttggcataatgagaggcaggtttcaggagttactgctgcaaccaactcttacctgccaaactataaagacaaactattttgaggattaaaggatgggatccctttgtgctttgtggaagcagagctgaaaggttcataatgacagacagaaccattaggaggcatgaaagaaaaagaagcagcaaggctgaaagtgttgtgtgctagaaaggagttgatgccctttgaacattcaagttcaaataatgtgccatactttatctccaaagacaacactactgacccactgtcagtagaccatgggctgtgggttgctttccagcagagaggatggattttcttcagttccgtctactcatgcttgacagagatttcctttgggacaagtaccacgccccaaggagcccaagcctggagaaagggaggctggatcatcatggctgacgctcactatgcaccaggttcccttctcagcattttactcagttgtccttcacaaccaagcaccctatgaagtagcaatgcttattatcctcaccttacattgaggaaactgaggctgaaggaggcaaaataacttgcccaaggccacacagctagtaaatggtacagctgggatttgaactcatcaagtccgatgctagagctgaatgaggctcttaagcattgtaccctgctgtagtgtagttagcagttggaaacatggatgctggagtccaaagaacatggattcaaatcctcattccccagctggttgctatgtgaacctgggcaagtgattcaacactgttggggcaagaaaggaagtcagaagcctgggacaaatcacgacacataagaagcactcaatgcatgctggccactgttagtgttttggttattgttttgtttttatcctggaacagagcgaagctaagaggtagtggttctctccttgagggtgaataagaaagaattaactgggcattaccaatgttgacaatgtggatttctgggccccactcatgagagatgctaattcagtggctctggggggttggatggtaaatggttggacccagtcacctgcattctaaagaagggctttcagtgatatggagcggtggacttcagactggccagaggcggcatgtgcaaggctttggaatttaccaaaattcagagcttaattttataattgatttgtttagctataactgagtgacagagtggaacactgatattctgtagactatctcttaatcattaaaaaacaaaaaccagcacaaaagaaatcaccaaaaggaatcaatatgttttacagttccagtactggccaattcagaatgtgtgctggagcaaacacgggagtatctaacagacctgcagagatggaagggatatgagagacctacgagccacatcctggttttatagctgctgaaggtgggggcccccaggggtagaatgactctcttagaaaccatatgattagttaatgggaaagtctgaaacaggactttgatatttggccacctggacatctctggacaagaggccaaaactggaaccctttgggaagttctgattccctgaattcagggtgatagcatgaagtaaggaggaatctcacagctgcttgttgctgcatgtgctttttctgtctggatgcttttttccaccatgcctgccagtaacttccagcttttctttagggtctttggtaagctgccttttcaaggacagtttccctgcctgtgtccttcacttgctcccaacagagttcattatgtcccctttcatcactcctgaacctaacggcattttttgcacttagttgatgttttttgttactgtcacctttcctctgatgcacttaggtagtacaagtagagccaccctcctattttgcatgcttgcagacatcactgaccatttatccatttatgtattcatccatatgtataccacagagcacccattacatatgccaggtacatttagagaatatagagaaaagtaaagaataaatgagaaaatatacaaataacttgataatttaagatactgatatggactgtgaagaaaatttaaaaagggtgatgtgacagataaatgatatggtgggagagatcctttttacagggtctttagggaagggccctctcaaagtgtgtctcatttaagctgagactcatgatgagaagtgggacccatgtaaagaactaagaatattctaggtgggaggaagaatatgtgcaaaagagctaaagtgagaatgaactaggcacctttgaagagcagaaggaagctagtatggatagaatggagtgaacaagaggaagactgggagacaggcagggccacatctgggaggacctccttgtaggccacagagtttggattacaacctgggagtaatgggaagctattagaggtgcttcaacagggaaatggcatagtggggtttgtattttaacagatgactcactagtttagacttgtcctcagcttcttctttttttttttttgtttttttttttttttttgagacggagtctcgctctgtcgcccaggctggagtgcagtggcgcgatcttggctcactgcaacctccgcctgctgggttcaagaaattctcctgcctcagcttcccaagtagctgggattacaggtgcatgccaccatgcccggctaattttttgtatttttcgtagagacagggtttcactgtgctggctggaatggtctgaatctcctgacctcgtgatcctcccgcctcggcctcccaaagtgctgagattacaggcgtgagccaccatgcctggcctcagattcttaatacaatgctccaggcaatctctacttattgatcaatttgcacttaaggcaagaaaatttttaggcattctagctaaactctttgagggccaagttcctgttttaatcacttttgtttgcctagcactttgtaccttgcaaagagcagattcttggtgaatatttattgtatgaatgaatggtttctgcattatttgatcctttggcataacaaagtggcaaagctctctctgctaggtgactttttagcaagtccactgaatagtaggtggtagcatattgtgaaaatggattgattgacacctcacctcacctctgctcatgttaaacattttttttagttctagaaaattcagttgtaattaagctgggaggtaacagagtaggacctctccaaagccctgaaatgactgcctcgctagcttttaagcatcagatagagaaggcctgttgaacttctgcttctagtattatgaagaatagatatttggagaaactctcccaattacagacactgagaaatgctgaatgtaatataaaaaacaaccttttaaatatgtagctaagctcacaaaaattgaatgtaagtctctacagaggcaaaaatggagagagagctgacaccagggtggtgagtgaggatctaagatatgggctgccttgggagtgtgtgcagataacagaaactgaaagcttcagttttaattgccatacaacagggatgagtagggaggggtgcattgtggaatgggagatgaggacttgggcgctgttacaaggtcaacggaactgattaagagtctgcaaaagccaggaatcttgaagatctacaccctcagtgaaaagatggactagaaaaatccatttggcaaagaaaaactgctatgagaaattgttctggccttggctgggggtggggaaatgtctctgctgagaattctgaactcatgaaggtttagggcttaaactcacattatccacatatgccgtccaggaaacctcaagcaaaagaattgttaagataattccagtttgagagagactcaggattccagcagaatcggaagagaatcagctttgtaggaatgttcccacagctggggctctttagaattctcacagattaaaatcaaccacatatgacttcacaatgaaaagtttccagttacacagagtaaacaagccatcagtggaaacaacaaacagtagaattagacttcccaagaacttgaatttaagaattatcagtcagaatataaatgaaatgtcctaaaatgtttctagaaataaaagatggatttgaaaacatgagcaaaatgctattaaaaatgtctaggcagaatttgaaaaggaaacaaaatgaaatttttgaaataattatattcaaaactgacaactcaaaaaggaaaaaaaaggttttaacatctgatatggtttgactctgtgtccctgcccaaatctcatctcgaattgtaattccccacctgtcaggggagggacctggtaggaggtaattggatcatgggggcagattttccccatgctgttctgtgatagtgagatctcatgagatctgatgtttaaaagtgcggcacttccttcaacacgctccttctcctgccgccatgtaagacgtgacttgcttctctttcgccttctgccatgattgtaagtttcctcaggcctccccagccacttggaactgtgagtcaattaaacctcttttctttataaattaccctctctcaggtcgttctttatagcagtgtgaaaacagactaatacaacatccaaatatttttctgaaaatcactgattagagtttgagtttgttatactgttaaattatatacaaagtttaaaaatcataaggatataccatgatgaatttccataaattaatgtactatgtaaccagtattcagatcaaggaacagaacattaccagcatctcataaaccccctttctgttcccttcatgtaatcttttactccaaggtcaactagtattactccaaggtcaaccagtatccaaaaataggggtgtgactattatgcaagtatcctgaattcttataccattttaattttgcctattaaaaagattttattcatggatttatatactatataatcttttgtatatgacctttgtctctcaacatatgaaaaaggataaaagaacttcatatttttccatatagttatacttttcttatttaatttagtattctattgtgtgaatatgccacattctacagctgttgggcatttgggtaattttcagttttgggctatcgttttttcctgttgggtttattcctaggagtagaattgctggtgacagagtatgcatgtattcagcattagtagaaattgcctaatggtttccaatatttttctaaaccagatgaaatcttgtctggaagttcagtaaacaaaaccatattcaaaacatcaaaacaaagtaaacataaaacctaatgtaatggatggatggattaacaacagattagacctagtgaagaaagaatcagtgatttggaagataaatatgagatattacccagaatgcagcacaggaaaaacaaaaggatagaaaaggagattaagagataaaggataaaattagaagacccaatttatgtgtaattgaagagagctcagtagaatggagtcagggaaagagagcctaaaattagccaactcaatattatccaataatgtgagctacacacataatttaaaattttctagtgtataatatgtatgtttttatttaacctgatatatgcaaaatatttcagcaggctggtatgaaaattattgaggtattttacatatgtcatactaagtcttcaaaatctagtatataattttgtacttacagcacatctcagtagtttaggctagccacatgtcaagtgctcagaagccacatatggctagtggctaccataatagtgcacatttaaggtgcactatctaaggtgacatctaaggtgtataagggaaggtaaattgagtgaagttccaggcattcggagaagtgagccagttgaagtaagaggactgtgtcatgacagtgggaggaatgtggataagtgtatcaccgtagagacagcactgggctttgggtttacacacattcatatccctcggtacaattattatacccttcaacatccagtgagttgcagaattacagctgttgagtagttcagaacaataccaaacaatagcttagtacaagaagagaaatctatctgttgaatttacagaggagattcaggacctcagaatttaattggcctcatgcaaatttgaccagaagcctaaagtgaacatgtgtgacatttacgtcaaagatcactgtgtgtattaatagaagcaggctggttggaagtggttttcctttctttggctataaggatatgaaaacttaacaatgaatacaagtagattgttactttggtttttatgtctcagttaaaaaataacaccatgtcggccgggcgcggtggctcacgcctgtaatcccagcactttgggaggccgaggcgggcggatcacgaggtcaggagatcgagaccatcccggctaaaacggtgaaaccccgtctctactaaaaatacaaaaaattagccggacgtagtggcgggcgcctgtagtcccagctacttgggaggctgaggcaggagaatggcgtgaacccgggaggcggagcttgcagtgagccgagatcccgccactgcactccagcctgggcgacagagcgagactccgtctcaaaaaaaaaaaaaaaaaaaaaaaaataacaccatgtcctagtgtgctcatatagcacaaaagctgtattatcaggctgtagatcaaataccgtatgaacttgacccaaataacctcagacttcctgcgaaattctatgtctgtcttagatacgtgactgtagtcagttgattcattttctttgacagctcaaaaacagcgaagcagggcacttggaatctctgtctagcctcagctgtttgaaaaatagtaatagaattgaaaatatatttctgtccttaaaaacacctctaaagtgctgtatttgtgtaatgataacactttttatgctggctctgccggtccaaaaataggggtgtgactattatgtaagggagatcattatgtaaggttgtgacctttataatggaacaattcttattcccatactctaagcatgaaactcagccaaataaatgctgccattatgtttgattatggggtaatagtgaaattattagtttaatccaattatcccaaatactgaagtatagggttgtgttagtctgttcccgttgctataacaaaacaccttagaccgagtaatttgtaaatgatagaaaattatttctcagtttttgagattggtaagtccaggatcaaggtgccaacagatttggtgtgtggtaaagacttgccctctgctccacagatggtgtctggttgctgcatcttcacagggtggaaggagccaaagcgggggtaaacttgttccctcaacccatttaaaagggcagtaatcccagccatgaaggtggggcctcccagagtcctcacctcttaataacatcaccctgggggttaagttctgtgatggttaatactgagtgtcaacttgattgaaggatgtaaagtattgttccttggtgtatctgtgagggtgttgccaaaggagattaacatttgagtcagtggactgggagaggcagacccaccctccatctgtgtgggcataatctaatcagctgccagcacagctagaataaagcaggcagaagaatgcggaatgactagactggctgagtgttcccgccttcatctttctcccatgctggatgcttcctgccctcaaacatcagactccaacttcttcagcttttggactcttggacttaccctagtggtttgccaggggctctcaggcttttgaccacatactgaaggctgcactgtcagcttccctacttttgaggttttgggactcagactcgcttccttgctcctcaacttgcaaatggcctgttgtaggacctcgccttgtggttgaatgagtcaatactccttaataaacctcccttcatatatacatctatcctattagtcctgtccctccagagaaccctaatacaagttccaatatatgcattctggagggacatgaagattcaggccatgacaagtgttctagaaggttctaccatactaactctgagatgttctttgtattggctttcagaagtttacaaaacagtctgtctaatgtacctatgtggtacctatagtaacttggtacctatgtggtacctatagtaccttggtacctatatggtactaaattgatcttcttataaaatatgggaaagcatgtcggtcagatgttgaatcttttatttgtgcttattttctatgaaaccaaagggacagtgccagtgttcccctggtgtcttggggctgagtactggtggtggtgaagaccatccagtggaaagagtgttaggctagaagctggagggtctggttgtgtgactagggaaagtcactggtcactttctgtttgggtgctttttccacagaaaaaatttatcatgtatgctaggattggaagacatcttagagattatttattctcacctaacacctaaattattagaactctttaaagcatctgcaacaaataattatccagttttgacttgaatgggccagaggctactcccttacaacaccactgctccattgtttggtgtttcacaggcgtggaacattcttctttgtactgagccaaaacctttttagccaatgcccagctcataaggggcttgggaagtaaaacattattaaatgttaatttaaaaaaacactatgcaaatctgtatcactgtttactggtgtggtgtggacctaatgaatggatctagtctgaattgtaatgcctaaattcttactttcttttcagcaacaacccaaactgaaaaaactaacatctttgtgatgtggcctcataatccaggcattgagctactgtgggtttgtcttgataggagggaaaagaattctgcctatctaggttaactaggaatgctcacattttttaaagctggttttcaggcttatctttagagtttaacattccaactcttaacagggttaggaattctcccacttctacttaacagcttgctccccaggacacgagagcctcctaggtttctctagtatggggtagtgggtgaattatatgttgtggggatgctgcaggtccagaagctctcattgagccatggggtcgggggtaggggttgtctgatttgttgctttgttttataggatattcattcatttttaattcacttgctagtatttgctgagagttcatgtgtttagcacagctttgtctcaggaagccctaaatatcctcttcaacatgatgtgttatcaccagaggaacttcagtgaagatggagctacatcaggctagctggggagggccagaggactgaacctggatctctgggatttccccttgggtgcattacaatccccaaaggaccctgccccttttccccgccagtcttagtccctacatttgaggaggatgctgggatccccctggttcactccactcctgccaccctggaaactctgactctagctctgaaggtgtggaatttagactggagcagtgagggcggtggcaagtcatggagctggagaccaggtaggggctgctggattctcagggtttctggaatgaatgtccttctgtcactttcatgttcctctttcactgaacagtcaacagctgagatcttggctgggtttcatactggacagtgtattattgactttacaaaaggtggtggggtgttaatgaggttccttcctgatttcgtacttgagtaatttctttccagccactgctgtgtatccctgctccttatccagtgcagtttccagatggatttacttcctagcaatttcggagtgcaaactaaaggtgtagtgtcttgttctaggtgctaaatcttgttgaggtagagagaagggagaaacctgaactatatttaaacaaacacagtaagtccctcagctcatgattggctggcccttggttcttgcagccgtgcagcagcaccaagcagaacttcattttacctatttatatccccgatgttgaaacaaacacacactattagacattccagagtaaagctcctgtgggaaatggaactgggaactatgtatccccaaggaaaagccagacattcaaggcaaaagctcaacaggaaaacaaatttgggctgcttataaactggaaaactcaatgctgctctgtaatgatatgactgaaaacaagtgactgctacaattacaggcagcatgtggtggaggagagactggtaatgctagatcacatcaagtgtaccgaatcaagtggttagaggactgaagaaagtggcagatctgcgagagttgagatgaacaagcaaggtgatcattgtaaaagctttctaatgacatgtatggtctgcctcccaagaggatcctgacttccttgagggaagaggcatggcagagaccggctctagagtcccagggtttggtataaactttggtttcctactcattagccaagttactcaacacgttgctatgtcagtttcatcatggaaaaatcacaagatctttaaatctgtgaaggagactttatttcttataaagggttatagcctgtggtctggccatttttgaaggctgggaagtgtagcctcttgcagaggctattaacagacactttgagggaggaaggggtggaacagggatttatgctgaggttggccaagtatacatattcaataggttacaggaggagctatgaataatcatgaagtgggagaggtacacgtgtgataagcaaacatgcgtattacctgcatcccatgttcactttggggtggagacttaacatttaagtgtcttacaattaggccttatatggcaaaacgtaaggcagggacacgaaggccctcaagtttacagcctctgtaaaccagccagatcagtccatggtccatggtctcttattaggagaaagttactgaaccacagctgtctcttttccaatcaaaaaatgtgggtatggcttgtggaatcggccgggggtcagcatctggtggtgagagtgctgcagttgtttcaatagtgcttatcttgaggccggtgctggtttaactgctagagaaaaagaaaaacttgtggcagttggaacagaatttactctttaagtgtggagggtgcatgacttaacccttgcctggcatggccttaggcaatctttataatttggtatcttattgccacagagtccattttgttagtcttaggatctctatgttaacattgatgctggtcagttgttgcgtctaaaccacaaaaaggaggggatgtaatgagacgggtctggcttcccatcgcaccgtggccaggaactcagtttctaaggtttctctggggtccccttaaccaagaggggatttgttcagccagttgggggtttaggattttagttttagttctcatcatctatggaatagtcattgtaataacaccttcctagcaggattatgatggggattgtcaatggcagatgacgtgcttattgtggtggctggtactccttatgtgttcagtatcattgttatctatgtttctgtcgttcacattggtacttggctcattgccaacattcagtaagcatttgtcgaataagtaaatgagcatttatgattagtgttttaataaaaatttcatcttcacttaattacttccctcccttgctggttaatattatttgatgaattaccgagacacatagaaaacttgggaataagggtcctgaaaataagggttctgatggttcaaatgcatagatagtaaatacaaatattttctcttaagaacataatcagcaatttaataaaaataaaaaattgctctccatgtgcttcatcattttgcaaatataaattagtgtgcagttaaccatatatctccccaagtctgctcttcctcctgtgtttaataaaaagtggctgcatcctctcaaatatctaagccagaaacctggggaatcattgctgggtcttatttttccttcattcctcacacgcattcatgtttgtggtcacacaagccatgtcccatttcatctcctggttagcttctgaacctgccttgtgtgtctgtctctgctattactgccttagaccagctgctgtcaactcttgtctgcattaatgacatagtgctctggctgataattaaggaaaagtcttctaggaatgtccgaggtaaccagtggttgaatttcctgctgacaatctctttagtgtttttgcacagaggatttatgaaggatttaagcagcttggattactgtgagtctgcagaacactggaggtgcttgcttcttccctgggtgaattacagatgagaagattgctgtggaagcctattggacatgcatttgacatgcatgtgcctgggagttttctgaagttttgtgttacggaggcacactaattctgaggaagtaaaacttctcatgagaacaggagatgtagctgtggaaaagtccaacacagatgagaaaaccattttcatatatatcagaaaaatgttacttattttatcaaagtttatttagcaaagcccacacatatcttgaggctaacctactcagggcagttgatagccagggaatgccatacaggagtatggaatcaatccttcagaattcagaggctaaacatttccatattgattaggaaaacccaggttaaatggattaatatactccggctgttctgagagaggtcttcaccgcatttgggcaagcttattgataggcttaccagaatggttagggaatccagcctggcaaggaatcgcaaagcacattgctggactggtgtgactgtacctcacccacaagagctgatcatcctctctgtaggtagaggttgaggaagagcctgggatgcacagcatttgggtggagaaatacattcattaggaaataaaattgaatagttcaaagactggttctggtgctggtgtccttgatgctggtagctcagttctcccatctatacctggcagggcttcctaacggagtccaaggtggactgtggctctttgagcatcaggttagtcatccctatggggatgtggttgtaagagataatggtcatatacatttctgcttctggtgaaaaaagaggaacctattttgtggataggtgcctggagagagatgagggaaagagatgagaatacaagggaatacatggagcctgggtgaagagaaaggtgaaggtcagaaggggaaaaagtcgtgtttgtgaaagaccatgtgaaagtttgggcacaaacagaaccatagggccgaggtaaccaactgtaatattagcaggtgggggagcctccagctttctctctctaccctgccatagaccccaggtgaggtttcttaccctggacccttccagtggcctctgcagagcggtagagagtggcgaacagtggtggagatgctgactcttatgtcagtgacctggtggtagccctgtagatgtggcagtgtgtcaggtctcttacctgccccacaaggagacaactagcaagaaggccaaagtggaggaaaatgagtggttggttttgtgcatattacaggacatctgatagtgccctcaaattggctggggaaggcttcaaagaaagcccgagtcttggtaattcaggcattaatgtaaatgtgactacatttgttttcgtatgttggtggctcctcccatctcaccgccttgaatgaaagttctatgaggccagaggttgttttgttcactgttatatgcttggcacttagtagggactccattcatatagattgaatcaatgactccattactaatgctggaaaaaaataacatacagggccagctgtagcagtggcgcgtctgttctcactgaaaaagaaactaaggcaagagtaccacgtaaaatagaattggctggattttcttgtctcatacaatcaggatcagcacagttttgtctttccgcaaaccaacaaatggaaaaggcgaaggctattgaaacgagtgggtactgcctgtgtgaccgctgtcagcgtcatcctctagctcctgtaactgtggttcttgaggctcccacagcgaaggggaatggaaatgaagccatttgtacataagctacatttggtgaagagtaacgacttactgattcaggctgtccaggaaggccatgtttcttctccatgccttttcatttcttgtctgggttgcattgaaaacataaattgtactcaaatgtattaatagctttctaatgtgagctctcagtaacaaagaaatgaaaagaattatttgaagcactaaaaaaggccagggtttcaagctggtttattttacttgatatgttataaaaaaaaaaaaatttggacagtaatgtcaaatcggagatgcctcagtatggttttctcaatagaactgaataatatattagtgagtgcatctaactagcaaatgggatcaggagcatcatggaaataaagacagaaaagtgccttaacagctttaaaattcacagatggcaaatcaagtaaaagatctgtttatcaccctctgaacactctgtaaagtgaacattggagggttaggaagtttctaatggcaactgctgtgctttgggaaatcttggtggaacccttggctctctgacatttagctgctgcagaacggggaagctgctttcctgaccacattgctttggtacagtaaagttgagaatctgttgtcctttgctgggagtatccgaaggcaaaagttagatatgtataataatgcactggagattgttaagccgtgtgctgtgtttcataaagtcttgtacaaacagcttgataaagaacattacagaatattaaaagctgctttctagtgtttagcctctttgtgtctacaattcagtgaatgttgtgtacattaactgcatggcttgagtcctgctatttttatgccatgaaaatgtaaattaataaactccacagttagattctataatacattttgactacaactcttaaatttagcatattttataaacatttcaatttgacctgtccttatttgcatgacatacgtttatataactttatgaaaataacatttaagaagttctacaatgcaggcatttattttctagttatggagtttttttttctctttcttctgtctctcccactccctttttcttcctttggtaaaccaatgcatgcaaagttaaacctttcaaaactcacccccaccgcctcaccccccttttttttgaggtttcaacagttggttcttatttttttcaatttattttattttattttattttattttgagatggagtcttgctgtgtcgcccagactggagtacagtggcacaatcttggatcactgcaacctccacttccctggttcaagcgattctcctggctcagcctcccaagtagctgggattacagggtcgtaccaccatccctggctaatttttgtatttttagtgtagacagggtttcaccatgttggccaggtgagtctcaaactcttcacctcaggtgattcacccgccttggcctcccaaggtgctgggattacaggcctgagccactacgcctggcctcaacttttagattcagggggtgtatgtgcaagcttgttacaagagtatattgtgtgatgctgagttttgagtgtgattgaatctgttatccaggtagtgagcatagcagccaataggtagtttttcagccctatgcctgcaccccttataacccccagtctctgtttccatttttacatccatgtgtaccccatcaaaaccccaaatttaatcacttggtttcctaacgatttgctatgtaatatgaaaatgtaaacatgtacttgataatatttacctatccataaatggttgtttcatttataacatgatctctattagatatccagtattaatatggattcaaccatgttctcatgaaacataattcatggtgaaaacttggtatgtagcatttggcctcaaagacaagtcttaggtctgtcttctaattaaatgtgaggaaattgtctacgtagttaggccccaacattctggctttatcaagctaaaaagatgaatgtattcggaagatgaggattcttgatcctacctacttgatcctctgtgaatcacccttaggtcagagggacttcaaaagatgagaatgactaatttttttagaggattaggatgaaaccggcatatttaaagaggtcaacaatcttatataagtgaataaatggatattttccttgtgtggtggcaggctttggaattatgtgaacttgagtccaaattctggctcacccatctagtaggttttgaatgacattaaacttctcagtctcagagcctttaccagtaaaatgaggatcagtaaaaagtaccatgtaggattattgtgacaactaggaatatgtacagtaagtgcttagctgcctggcacccagtaggtattcaatagatggtagctattagcaatatttatttgtaaatacgtagaatgcattaagaatctgaaaagagtctgggtgaggtggctcatgcctgtaatcccagcattttgggaggccgaggcaggcagatcacttgagtccaggagttcgagaccaccctggccaacatggcaaaaccctgtttctactaaaaatacagaaattagccaggtgtggtggcacacgcaggtaatcccagctacttgggaggttgaggcatgagaattgcttgagcctgagaggcagatcatagtgagcagagatggcatcactatactgcagcctgggtgacagagtgagaccctttttttttttcttttttgacacaatctgaaaagaaagttctgttatcatggtatatttataatataaggtagaactgatggtgttaagtataatcacatacacaagtatatacatgtacattctaaatccaagattgtttctgagacagattcaagaaggaatctttcagcagtgaattttggcttctctgaagatacaactctttaaaggcagcatcaaaatagttcattttctccaatggttcataggtgggtagagtatccttaacaagtatactttacttgctgctttgaaacattacagcatattcaagcccacatttggaacaatggtttttcccacttattctttcttaaggttatgataacttcttttccttcattctcatgatttgggccatccacagaatggtggagtcattttttgacttcaccctattggtactcacagagaagaataaatgaaagtcctagagggttactctagttgaggctattccaaaagtgggtaaatttttgacgattcttaccaccacaattcttcctctattttcaaagttaggaaaattttgcattttattgcaacatgaaggataactacaaaaagcatagtcccctgtatgtgtcatgttaagtggcctagatctctccggttgatcctttaatgagatcactgagtttgtcatgactttcaaccaccaaacatattttagcaaattctaaccatgaacaaagttaaagacttgttaggaagaaggcttaattgagaaggaagaatggaaacatgatggacttagaacacaggtgcatttgagcggcagccccagatctgttacttactagctgtgtgtgaccttgggtaagttatttagtgctattttatgctatactctacttcagaatgggaataatactacttacagtaacctttgagttttttatatagatcaaataagacaactcatgaagcactagtaacagtatctagcacagagtagttatttgataaaaggtaagcttccttcccttctccctcactttatctgtaaaaagagaccagtcaccctgcctacttgtgtgagaatgagtatttgtgcttgtgagtatcaaatgaagcaatatgaaaaaactttgtaaatataaagcacaatatcaacataagcaagaaaaatgacagattttatgatcttggatataataaagctgtgcacttgttgagaagttggtgaagattttaaattaatttgactcccttagaaattccttggtaaaggaaaggtgagtagttttgcactccatatgtacagggttaaataatgttccccaaaatttgtgtccacctggaatctgagaatgtgactttattttgaaatagggtctttacatatttaattaaataagttaaggtgagatcataccacattaagatgggccctaatccaatgactcatgtctttataagaagagaaaacacacacacaggggcgaaagccatgtgaagatggaagcagagattggagtgatacatccaggaggcaaggattgccagtgaccaccagacactggaggaggcaaggaagggtcctctctagagcctgcagagaacatgggcctgctgatgccttgatggcagacttccagcctccaggactgtgagataacaaattgctgttgctttaggccacccaagaaggtccttcattatggaagcccatggaaacaaatacacaccatacttctcctgtttttattggttagaagtttgtataatttaaagtgatgtaaagatgttgctttaacttagacaaaaagtatatgaggtcttataactttactgaaatcctgccacaagtggaaattaattctgacattatctacatgtaagagttcccaaaatattggtttttctttgttcttaaaaaaaatctaaagaagctgggatgaactcagagctgggggaaagctttgagtgtccaattagtcaatcccatccctttgctaaacaggtgaacttacatagaccagaaaaggtatgtgtggggatgagcctgaggaaacttggtagatttttataatggaattctcccttttaaaattaaaatcatgttgggtgtcttgattattgccacataactgatctgaaagttttgttttacctcccaaacaattttgggttagtccataccaaagctttatttctcttctctaagaaaaaatatatatgataaatacttctacaagtaacttaaagcactgctggttatttgacatatatccgcaaaaaaagcaaagctgaagagtattctaaaaatcaatagtataataaactgaatagtattttgtctgaagccttttaggtttttccctttagagcatctttctgcttaaaataggcactgccatcatcgtgttcctctagctaatgaaggtcctgtacagttcttggactgggggaaaacgggagaatggtttgtgcttttctgaaaggaggcacaatttgcatcatttttaacaacagtcagtgtggtttcagacaaggctgctgaaaggtgaaatgaaaagaaatcttgtcctcatgtgcccctgttctctcatgatatagcacaaacaatgcagggaactggggtggttgtaatcctgaaggggcaatcagcatccaagccagtggaacctgacttttatcatgtgccatctctgcaaagatttgaaaaggccttgcttcttttgtcacacagatgggcacatctgtaaaagaagggactaactagtcacaatagctgaaaggttctttgtcttttatttgtaaacttgcactaggaccaactcttcatctgtgacatatgttctcattatttgaaagcaagtttaatttctacttaataagcattcaattggctgtgcattagcaatcgtctttaaacagagttgaaaatccattctaggaaaggtgccagtggcccatgcctgtaacacctgcactttgggaggctgaggcaggaggatcacttgaggtcagcctgggggcaacatagtgagacccctctctcttaaagaaaaaaaaaagccgggtgcggtggctcacgcctgtaatcccagcactttgggaggctgaggcagatggatcacctgaggtcagtagttcaagaccagcctgaccaatatggagaaaccccatctctactaaaaatacaaaattagccaggcatggtggcatatgcatgtaatcccagctactcaggaaggctgaggcaggagaattgcttgaacttgggaggcgaaggttgcagtgagccgagattgcgccattgcactccagcctgggcaacaagggcaaaactctgtctcaaaaaaaaaaaaaaaaaaaattaggcacggtggtgcttgcctgtaatctcagctacttgggaagctgaggcaggagggtcactgagccctggagtttgaggttacagtgagctatgatcatatcactgcactccagactctatcctgggtgacagagcaaaaccctgtctctttaaaaaaaaaaaaaattcatttctatgaaaaatagcactggacaatacaagccagaggtcatattctgacttggctaatggacaaacaaaacaacaaaaacccaccacaaaacatctctcaatgaaaggaacaatagcaacagtagctagcatttattgagggcttactatgcacagggtgctttataagaattagcccatttggccttcccagcagctgtacaaggagatgcaccacaattactgtcattttcatttcataggaaactcgctcaggtgagttcagtaacttgactaaggccacagagcagatttgggaatcaaattcagtacatatctgtgttcgtggtgacaaagacttttgtccagtttatgtgcatcttattgtgatctgtgcctagtattcaatagcacagtaaggaaattagtttacaataatgtaatttaaaaatagctaaaagagaaaatttataatgttcccaacacagataaatgaggtgatggatatcccaattaccatgatttgatcattatacattatatacatgtatcaaaatatcacatgtattccccaaatttgtacaattatatcaaaaatacaaaagtatgaatattggttaaacaaatgaactatttgataatcaagaatcaaagacaacctcattaggcctagataaaccaaaaggtccttttttttttgattccacatctagaaagcaaaagacatagagtatgaacatgatttggggtttgcatttcaaatacgttttgctaaagaaacggcactgggtgtacatgtattatcacccagaggaggtaagtttatagagtatgagtgtttcctttgcccactttctgtgccccacatcatttagtagtagatgcctctgagataagaacaatgaagaataatgttctcccttttaccttatgcctaatctatacttggttctccttcagtgtttgttactttgttctcacaaacaaatgggcaatatcaaagaaatccctggtttgtttacctttatattgttcactcctttctctgagggatgttttccctttgctgttccccctttttttttttgacagacatgtttcctttcattgaaagagatgaaagaaactaggattgtttagtcacaacaaaacaaaacaaaatatacatacgaatcaatgaattttgagttgtgaagcacagtaggaaaaaagtattgtttctttggtcacaaccctctccctcttgctaggatgtgcatagagatagtaacttagcaactcctctgagatgaaaagcttcaagtacaaactaaaatgttggccccttccaacttctttgacaattgtctatctgtgtaggttgtcgagattttgtgaagtatcttcttaaaaagtagtttacacatataaaattaagtaatttttacatgagcatttaaaaagtagattagaagcccttttggaaattagttagaaatcttgagaatttgaaacaaaaccaactacccaagaaaccatcctcaaatccatatgcttaaatgtgctagtgtgatgcaaataatatagaaacaacctagaccaatattagtgaattcagaattacaataaaaatatatagctaatagttagagcgtttgtaccatgtatcaagaactcttcaagatggcctccctgtaatcccagctgcttgagaggctgagatgggatgattgcttgagcccgaagtttgagaccaacaggtttgagaccagcctgggcaacatagtgagacccagtctcaaaacaaaaccacctcttatcatcactttaaatgtattagctcatttagtcttcaccaaaaccatatgatagcactcttattatcatctctatgttacaggatgaggaaactgaggcacagagaagttaagtgacttatccaagatcaaacacttgcaaagtgagagagtccagatttaaactcaggcagccttgctcaaggctctgctttattgcctttaaattatgaataaattaacaggttatttggcaagactagagataattatgagggaagtgtaacaatgtggaagcatgtgcagaataatatgttatctaaaggatacttggctggtaggggcatgtgtggttttttgcttgtttttttttttgtttgtttgtttgtttttgagatggagtcttgctctgttgcccaggctggagtgcagtggtgtgatcttggctcactgcaacctctgcctcctgggttcaagtgattctcccaccttagcctccaagtagctgggactacaggcatgcaaaccacacctggctaatttttatatttttagtagagatgaagtttcaccatgttggccagactggtcttgaactcctgacctcaagtaatctgccctgcctcaacctccccaagtactgggattataggcatgagccactgtgcccagctgggcatgtgttcttgttatataatgactatgtagacagagactgaaaactattatttaataatggtagatattagggtataggaatccccccaaacttgaatgtcacattatttcttcataaataaattaatgaaagcacattaaagtgctcattatctatgtttttattttgccattaatacttgtaggtgatgtcatttcatatatccttcactaagaggttataataatgtagagagagacttaagctttttgtttattttccatccattcatttatttattcaatatttattaaatgctggtagtttacaccaggctgtatttgggtgtcggggaagacaaagatgtataaggaaaaacaaatacctacctttaaagataaaaaccaggcattttgcggaagggggtggataggcaagtacacaagtagccccaaaacagtggcaggaatgctgtgaagagagatgctcagggtttggtgggagcagagggaagagcacctcatttttctggataggctcataaaggaggcccagaggaatcacctgagttaagtctggaaggaagagtaggaagtgttcctgggaaaatggtggggaaggcccttctaagttgacaggagagggaggtgaaagtgcataggtccggaggggatagaactggccacattgagtactttaagtaattcaacaggtctgaaatggataattagggttgctgaatctaaaaggcctgacttgacaaggtagaattctgtaaggtatgcggcttaactagttttgttcattctgagctctaataattattagctaatttttaacttaatgattagttaagattttcccccgtccaggtagtcataacaatatctagactctggaatttttgaagatgacaaaattatttgttttgaatgactgatcccatgttccataaagaaaactacatataaaattaaatggtgtaagcatgtgtaggtatgtttttctctctatatctacattaaaatagtaatagaggataaactaattttaaagaatagatagtacatttaaaatttttaaaaatttatttttaactgacagaatttgtacatatgtatcagatacaatgagtggaatgaaagttgaagcacccattgtgggaaggatggcaaagagaaatgggcaaggaccaagttgctgtgggagtgatctataataagatcactatttgatccctataaatagcccgacaaaactagagaagtcaacatgaaactttattttcacgttttaatattctacttgatatttcacctggaatctggggtgggggaagggggatttagacacctgtttgtaaatcaccatgtgacctggaagtccctggaaaacatgacttgactggtatttattaatccttttgatataaagtctcttaaaatgattttcctatgtaagtgtgactaaggagtaatttaggctgatttctctgatgtcttgccaaaatcagtctcattacttggtattcacattttccatgtcccccatacaatcagtccatcaggaaagctagttaaatgagagttcagatgacttcttacggattaaacattaagggttttgttggaatggggccattttccaagtattatttattttcttaattttaaaaagtatttggtgcttgaacagatatgccctaggatccgcaaggtaccttgtcctttcattattatgcagaaggagcaaattaatctttagggttattaaaggttgaatgggggctttattcaaactctattttataagccttggaagtagaatggatatttagaagataacctaatctgacaccctgataataacagtactcataatgataatagctaacatttactctcacctgtgtattagcttatttacgccgcagtcctgcaaacattgttcttattttacagatgaagaaactaaagctaagagagattgatgaagttatccaagatcataaccttggtttgttggactccaactctaaagcccacatttttctatcatcctctactgttttgttgtatactcgaggatgctgaggcagagaaaagctagttattgaaaacataggactagttttgaaagagtgaggggaagctacatctttggactcagtcattggaggagctcagagcctgtgggtcagctggtggtaaatgagggtcttgcttctctctgggtgccctctatcaccagtaggggtggctcatctttgagatagggcctcatgtgtcttgctcatgcttcaagtataattcatgtaatgacagtgattgaatgctgatgcttttgggatcttatgttgtatttttatgtttgtttttgttttctgatgcttggatcaatgatgaaaatgtttcctgaaaacagatactgcagaaagagctctttggatgggctggaatctaagttttagagatgccaaagcttatgaaagcagtttcctaaactgtgagagtatttttttccatctttttctgtcacttgcaagactctgtaacatttgagaaggtgattattaggatatgttccatagctaccgttcttgacccaaagtattaccaattgctcaaaagaagctactacctcactctttaagcctcagaaagactcaaagcctcttgaaatgccatgggagtcttgctgcaaattagagttgatatgagaattaaccgacctcacatttgcttagaagctttgtcctgcggagttgacctacctgctaggggattcattccaataaagaaaagtaggttttgacctaattgggtcatccagcaaataaatgatatgaaaatttcaagcttcaccacagcctgaaacatatgcttgggtcaatggtgtaaactctctcttccattgaccagcactttgattggacattgatggaggttatggcttttacattctcatttatgtttgaaggttgtatgtatgatgatgttgtgttcttttgtcgagaagaaaaatattaaaaataccaacatgtattaaaagcataaaaacaaatttgtgttatgcatttactttgagtaaggctcaatgttagccacttaggagcataactggacattcaaatatggttttatccttagaaaatgtgtaatctattagggaaacagtgaatacttacataagtcttatggtagctatatggacagtagagaaattaaaagtattgtttctctctggagatcgcactgactttggatttggagtactctaagaaattggaccttaaaagatgagtaaaatataggtgtggagaggcttgaaggtgggaaacatgagatacctttaggggaaggggataaataggtcagtctggccagagcagggtcagagtgtgcatacagaaagtgggagtgggtgaaagcagaaggtgtggacttgctgtgttccagcttgatatctcttcgccaacaaggctttgggcagcttcaggcatgattagacattttgttttaataacatgaagaatgtaaggatggcagcccagtccttgtacttgcgtagaacatgaccttcatgttcagtggtaccaggggttcctttgctgtgtacaacgtaaagtgctccctggcttggagtcatatattttttatgtgtctcagacttctttcctttgtgagccctgatgggctccctgagactcgtgataaagcacaaacctatcgggtgagagcagatatgtcataaattaacacacaggagctcagagagctttctttggaatagtctagaatctgagaccacaaattgcagtatctcccagaaacaagattttagagttcatctccctagagaagtaacttcctccactcacacccctgcctgaggaattttaaacaacaatgacaaactgcaaatggactaaaatttaaacgaagctttagtatctgtaacaaactttggttagctattcaaaataatgatgcataatttggtagcataaaacatatgttcttcttttatgcatttgctctgtttacttcctccaagtttttatttgaaaaggtatttcacatatattctgtgccccaggtagaatttcttaatcagaatattgtgtagatctcttcatgttgagtttacttataaggtggcaatacattaataggagtagcagttgttaaacaccattttacaaaaaaggggagaaacgtgtttcatcagtttgctaccacaaattgaaacatacatgcaaaaccaagagttgtaataaatatgacataagttaacagagcatggaagatagaaaaatggaaaatggtgtccctaaatcaatttaatgcggtaccagccccaaataaacaacagattgggcctcttcagcaaaacaccctagaaaaacgaagcttgtcagaaattcttcacagtatattcttcatcatattacagcagagattatctgacagaattaagcagaaagtcagttatgagaaatttgtcctcttggtagctaatgttgaaaatattatttatattaacaggcaaaataggctggtagtacacaagcaattttctaaattttatggatgtggttctgcccataaatctgtgtgatgatggcatatctcttatgagactacattacctttcaggttactataattgcactgaatgaagagaatgtccacttgaagattaaggcatcagagtgatagtcactagcagatagacaggaaaaaggtcctggtcttcagcaacaaaagaaactttccaattagctataaatgaatataatttgaacactgaccccttttatattcattatattctctggaactatttcattgctagaaggttaagggattgaaattaaaacactctccttttttatatgataaaaacaatgtaggtagttaaactgtcaaatgcattgaacccagaaatagagactctgacttttgtagagatgaaatgtaatttcatttcagcattctttcaatgtgacgcttcttctgatattgcagagttatttagtcttggccctgatgtaaaggagttggcatttctaaaatataagcttacataattgaatcagatgagaaatacaaatctaggaatcagaatctaatacttttcattttgtcaaacctgttaaatgagagtattaaatttaaaatactgaaataattttttaatctattcataatccttgttatatcagataggatattttaattctcctctgtaaaaattggaaaaatgtactgttgtcatagacttacataaacgttcaaagcttttagtagctcataaaagtgttttaccagaccatttgactaaagaatacccatagaagaaagaaatcaattcattcacagcatgattttttttacctcaagctaatatttaactaattataatgacaataagaatgagttaaaaaaataatgtctgagctagatatttattagaaaaaataagcactgtcttttagtttggttacttcagaatctataaatatgcatgggttccatctttgcaattcataaattcataatactctgctttttatttttatgtaaatatacctggggtagactgcatcactggtcttaattctccatctctccctgtaccacttcctttgccatttaactttacagttcatttccactgagggcaggacatttttttttttttttaagaccgagtctcgctctgtcgcccaggctggagtgcaatggcacgatcccggctcactgcaacctctgcctccagggttcaagcaattctcctgtctcagcatcctgagtagctgggactacaggtgtgtgccaccacacctggctaacttttgtatttttagtagagatggggtttcaccatgttggtcaggctggtctcgaactccaaaggcaggacatattaacaattctctgttcctgggctctgctgtgtggcttgctttggctactagaatgaggtagagatgagggtataccagctctgagcttagacctcaagagcccttgtgtatttctagtggcaagcttctcttccatcaccatgacaacatgtctgcatagcctgctctagaggatgagagatacgtggaacagggcagaggaatccctgtttccccagccaaggccagctgatatcagctaactgccagctgactgcagacgtgaacaagtctggccaagattagcagagccatctagccagccctcagctggcccaggcataaacaatacatgcttattgctgaatgctactgaggtttttgtggctctttgttatgcagtactattatggaagtagatatctgatacattagttttgcggctctaccatcagaggtcaaaatatgttgacttgtatttttccagcagtggggatgagttgctgtaagctggttgctttctttcaaaaggttctcctaacagtataaatttgaggggactgattggctcctgggggtcacagaatagttttaaccctgtaaggctcagttgttcatgaaccagacagagatgcaggctttgaccttgacttcttttcacccacagttatcagttttacctcctttcctttgtttctattttttcctttttttaattgttcagcaaatattaactaaacatttagtgcttcctatgtcagacagtcattaggccacagactagactgagggaggatttgcaaaatgcacttaatttgagccaattaagaaacaatttaggtaaaacatcaatttggggatatgtgctgaatatttaggcgtacagtccttctatcaggagaacgaaaaagaaactggacctgctgtacagggcaatgagagaattctgcagatcctctatcaaactgaatataatgatgcccatccccctctggccagtcctaaataaagccacttctctgcactggagatgactcattgtattcacaataaggcacttgagaattactgtttacagaaagcatcaccagcagcagggtttaagaataccccacagtgaaaacacaaacacatttgtaatgatgagtgatggaaaaatagctcaaacctgcttaggtctgcaggtcttcctaccatactgtgtatacttgtattaggtggtagggaggaaatgccacactggaaagagaacactgagggtagatgtttgactacaatccaaattcctataaaagacacttctgaagcttctaacttttatggcagttttggatttacgatacaatagaagaagctgggagatggaaaccatgagaaaataaaagttcctttcactgctttggaggctcagtgtttatgtgatcgtttaatacaagataaaagtcacagggataggagtgtggagaactgattggaggagaattgttgtcaactcagccctggtggattgatgggggaggctctgccaggtcaaggttagtgaatgtcatcaaacttgtctggagggtttggatttgactccctggacaaagtgaattgcttgatttattaacaagctttgcttgctatttgataagcactataccaggcttggctggaggtgttcttgatagattggttggggagattaagcatggcatgagaacaagttaaaaaaaattatgtcaaatgtagtatatgtacaaagtaacaatcttatgtacaaaataataaagcacagatggcagtccattcattgaagatggtttttttcaaggtgagtgtttgtcttttgcacaatgcttgagatggaaatgacttggctgagactatgtgatgagtgctccagatggggcatggcatcggcatggggtaggggtggaaagcttcttggagctcaagtagcccttcatcctagaaactgcagcaaagctaagatcttcctgttcagtattttattaatgtctttaagaacttttcactgtaattatttcagaggcataatcatttagaaccaatgacatttggctcagtcacttactagttatatgacttgggccatgtattaacctgtgtttcagttttctcatctataaagtggagttatcaataatgcttctgtcataagtttattgtgaggatacaatgagccctcctgaaatactccatgtagaagtgctcagaaatgataactgctattgcatgtcaaagaaaggaatttttaattttatttctagaacctagcacttgtgttcttccattgcaggcactcagtaaattttgttagatgaatgtgtgaagagtggctgacagcaaggggccaaccacaaaaaagattgttacatgagatcaaatgagttcggtggaggaataatgagatcagagataaaagagacctttgattctttcagccccattgtagtatcatttttacagatgagaaaacaggtctgagtacattcagtcatttgaacctggtgaacaggaagatgatataaagatattgtattggagaaaaattattcttgggtggaaagatgaaaggagtcaaggaagtgagaacaggaaccatgggctccaaggtctataatggtagacctgacacagcagaggccgtgatggagggacatgcccaaaaatcatgcagagaaagagccaggagttagtgattaagaggagagctgagaacaccaaatgcgcgtatgtgacaaaggagttagtgccagttatggcctcttagctggtagcttcggagattatctgggtgaactcctgtttgctatttgtatgaaaaaccctgaatttaatgttctgacttcagggattggagactcacttaaactatgcagacagacatgcagttcttatttcaatttagatgttaaaaaaccactcctgcttgctttgacatgagaattctttaaaaaagtaaatcctctctcaaaatagttttgttttggcactggggataaaaagcatatacatatacatataatgtctcagggtgtgtagtgttggggttatcataacctagatgttttgatattaaacgatgttcttttaaacagcttgtacttgtctttgtcagggaataccactaggaagaaggcagttctgggctcattaataaacactatgttcttattgtgtattctcaactagagtaggagatctacagatgtgtatcttgctctcactgtctgaggagatggatgcattgaaggtaagaggggcctcactgaattgtgcagcacttgctgtctcttggttgttcacaactgtggaagccaacctcaggtgactgagttcatataactccaactgccagaactttagggattcctttatttctcagatccctcacctcatgaaacacttcccacatgaggtccctttgactaagttctttcatgtccaccacagtcccacaataatgatgtgctatgtgtaaagggcaaggagaacaaagaaggcataaccaacttctggggttcagagtaggctccacagagcaggtgcatcctatttacactatttttcccataagatctcttgcattacaactgaaaagctctcatcagcaaattaatacatttcatattctctttgtacacgttttatgcttttatcagtaagagtttaggtaggtaacagatgaagagaaataaactaaggaacagtttcaaagatgtgggcaaggtcaagaaaagctaatgaggggtggtgcaagagcagaaggcagctgggagaggctatctgctaggaacttggggaaggaacccagccatcatccaccacagcacagaagggagggagttcaaaagataaatactcttgcttcactctcttcctgccttctgctctcctgccacttggccttcctgggacgccagagtgaagggatcccttaatgtagaccataaaggccagactgctggggcagattggacacaaggtagaaagtgttatctgaagaggcaatggataatatctagcaatacctgctacaagtcttggtttgaacattcatatgtatccatgtctaatcaaaatataaggtcattttcccctcaccccaccaagacattaatagttaaatatatttgatttacaactgatctaactggtttttcttgcctggatatctgccctagttatctctttagccgtggtttatacaatgtctgtgtctctgttctccacatcacctccttcatctgtctgtcctaaagctctttttgttttatactgttattgcatatttatcatgattctgtattctccatagtacaaatacatacataaagaattttgtttagctctttcccctgttaaggctcaaatcagtgcacactattaagtcacaaaataccctagtgaaatagatagtaatgcatacttaatgagaaagaggatgagagatagaaatttattcagatgattaagtgggtaaaattttttgtggccaagtgaaagattactcacaccaaattgtatacatagattcttgctgggatcacctatttcttggatactacattgccagggatcctggatctcttccttcttaatctcccaaatgcaacaagttctcttaaacaatattgacacctgagctgatgaacttggctgagcccagtacatgggtggtcatttgggtaaggaatgaactttttcataaaatccaacttaccaattttttttcgtagattatgctttggtgttgtatctaaaaattcgttgtcaaactcaaggtgacctaaattttctcctatgttttcttctagaaattttatacttttgcattttatattttagtttatggtctgtttggagttaatttttgttaaaggtataaggcctatgtctaagttatttttcttatttttgcatataaacatccaaatattcccatggcatttgttgaaaatactctctttttccattgaattgccattgcttctgtgtcaaagagcagttgattatatttgtttgggtctatttctgagctcagtattctgttccatttatctagtaatatatgtctattcttttgctaatacgacattgccttgattattgtgcctttatagtaagttttgaaattgcctattatgtgtcgttcaagcttactttactgtattctgttgattattctaggtttaaaacttaaatggataaactttagaatcaggtaatttataaaatagcttgctgggattttgatttggattgctttgaatttatagaccaagttgggaagaactgacatcttaacaatattgagtcttcctatccttgaaaatggaatatccctccatttatttagattttgtttatcagttttgtagttttcctcttatagatcttatacatattttctgagactttatacctaagtatttcatttttggggtgccattgcaaatgtattttctctcatttcaaatacaaattggtcatttttggtatatagaagagcaattgacttttgtatattaaccttctattcttctatagtgaccttgctatactcactcattaattccaggaacttttcccctatcctttgggattttgcacagagaaaattgtgaataaagacaatttaattttgtcctccccaatctgtataccttttatttccttttcttgtcttatgtatttaattaggacttccagtatgatgttaactaggactgttgagaggggacatccttgccttgttcatgatcttagagagttactggtttctcactattaagtaaggaagtgttttgtagctgttctttatcaagttgaagaactttccctgcattcctagtttgctgataatttttattatacacggatataggattttgtcaaatgccttttctgtaccaagtaatgtaatattgcttttttttcccttagcctgttaatgtggtgaattacattcattggtttttaaatattaaaacagccttgcctagctagaataaatctcacttggtcatgatgtataattatttttatatattgttgtatttgatttgctaatatgttgaggatttttacatttatcttcatgatagatattgatctatagttttcctttcttgtaatattcttatttgctcctggtgttagggtaattctggactcatagaatgagttaggaattatttctatttcctgtaagagatagtggaaattgtatcattttttccttaaatttttggtagaattcaccagtgaagccatttgagcctggtgcttttgttttgatggttgttaattattgattcaatttcattggtagatatggtcctcttcagattatctacttttccttttgtgacttttggtagttgtgtctttgaagaattggttcactttatctaatttgtgggcagagagttgtttgtactatttctttattatccttttaatgtccatgtgatcagtagtgatgatctttctttcatttctgatattagtaatttgtgtcttctctttttcttggttagcctaactagaggtttataaattttattgagcttttcaaagagctgcttttgatttcattgatttttgtctattgtttgctgtttaaaattttattgatttatattctgacttttattgtgtttctttttgttacaggcttccaaattgttctttttctctagtttttttttagagaaagtttagactattgattttatgtctttcttcttttctaacatatgcatttagtgccataattttcctttagatctactttactgaataccacaaattttggtgctatgttttcatttttgttcagaatattttcagtttctcttgagacttccgctttgattccatgtgttatttagaagtgtgttgtttaatcttcatttttttctattttccagttgtctttctgattttgatctatagtttagttctgttgtgatctgaaaacatacttagtatgatttctattcttttaaatttgttaatgtgttttttgatccataatgttctatcttggttagtattccatgtgagctttagaagatgtgcatacatgttaaggattattatgtctttgtggatacttgtctaccttctgcaatgcctttatttaagtatttttcctgaagtttaatttgtctaaaattaatatagttattccagcttccttttggtcagcattagaatgatatgtgctctatccctttacttttaacatatttgagcttttatttatttattttaatttttccataagttattggagtacaggtggtatttggttacatgagtaagttctttagtggtgatttgtgagattttggttcatccatcacccgagcagtatacactgcactatatttgtagacttttatccctagtccccctcccactcttccccccaagtccccaaagtccattgtatcattcttatgcctttttgtcctcatagcttagctctgacatattagttagaacatatggtgtttggttttccattcttgagttacttcatttagaataatcgtctccaatctcatctaagtgactgcaagtgctgttaatttatccatttttatggctgcatagtattccatcatatatctgtctatacacacacacacacacacacacacacacacacacacacacacacacacaccacactttctttatctactcattgatttgtgggtatttgggttggttccacaatttcgctattgtggattgtgccattataaacatgcatgtgcaagtatctttttcgaataatggcttcctttcttctggctagatacccagtagtgggattgctgggtcaaatagtagttctactttaaattctttaaggaatctccacactattttccatggcggctatactaatttatattcccactagcagtgtagaagtgttccctgttcactgcatccatgctgacatctactgtttttgattttttgattatggccattcctgcagaagtaagatgatatcacattgtggttttggtttgcattttcctgatcattagtgatgttgagcattttttaatgtgtttgttggccatttgtatatctttttttgagaattgtctatttatgtccttagcccactttttgatgggattgtttgtttttttcttattgatttgtttgagttcattgtagattttggatattagtcctttgtcagatgtatagattgtgaagattttctccccctttgtgggttgtctgtttactctgctgacagtttcttttgccatgcaaaagctctttagtttaattaggtcctagctatttatctttgtttttattgcatttgcttttgggttcttggtcatgaaatccttgcctaagccaatgtctagaagggtttttccaatgttatcatctagaatttttatagtttcaggttttaggtttcagtccttaatccgtcttgagttgatttttgtataacgtgagagatgaggatccagtttcattctcctccatgtggctagccaattatccagcatcatttgttgaaaagggtgtcctttcccacttgatgtttttgtttactttgttgaagatcagttggctgtaagtatttgggtttctttctgggttctctatcctgtttcactggtctatgtgcctatttttataccagtaccatgctgtttgggtgactatggccttatagtatagtttgaaatcaggtagtgtgatgcctccagatgtattctttttgcttagtcttgctttggctatttgggctctttttttggttccatatgaattttagaatgtttttctaattctgtgaagaatgatggtggtattttgatggggaatgtgttgaatgtatagattgcttttggcagtatggtcattttcacattattgattctacccatcccatgagcatggatgtgtttccatttgtttgtgtcatctatgatttctttcaacagtgttttgtagttttccttgtagaggtcttttgaccccttggttaggtgtattcctaagtattttatttcttttttgcagctattgtaaaaggggttgggttcttgatttgattctctgcttgcttgctgttggtgtatagaagagctactgattttcatacattaatcttgtatgtggaaactttgctgaattcttttatcagttctaggagatttctgaaggagttcttagggttttcaaggtaaatgatcatatcatcagcaaacagtgacagtttgactttctctttactgatttggatgccatttatttctttttcttgtctaattgctctgactaggacttccagtactatgttgaagaggagtggtaagagtgggcatccttgtcttgttccagttcttagagtgaatgctttcaacttttccccatttagtattatgttggctatggttttgtcatagatggcttttattacattaaggtatgtcccttgtatgctaattttgctgagagttttaatcataaagcaatgctggattttgtcgaatgctttttctgcatctattgagatgaacatgtgatttttgtttttaattctgtttatgtggtgtgtttattgacttgcatatgttaaaccatccctgcatccctggtatgaaactcacttgatcatggtgggttatctttttggtatgttgttggattcggttagctagtattttgttaaggattttagcatcaatgttcttcaaggatatcggtctgtagttttcttttttggttaggtccttttctgattttggtattagggtgatgctggcttcagaagatgaattaaggaggagtccttctttctctgtcttgtggaatagtgtcaaaaggattggtaacaattcttttttggatgtctggtagaattctgctgtgaatccgtctggtcccggactttttgtgttggtaatttaaaaattaccatttcaatctcactgcttgttattggtctgttcagggtatctaattcttactgatttaagctagaagggttgtatctttacaataatttatccatctcttctaggttttctagctatgtgcgtaaatgcgtcatagtagccttgaatgatcttttgtatttcagtggtgtcagttgtaatatctcctgtcttgtttcttagtgaggttatttggattttctctcttcttttcttggttaatcttgctgatggtctatcaattttatttatctttttaaataaccagctttttgtttcatttatcttttttgtttgtttgtttcaatttcatttagttctgctctgatctttcatgataacttcctttcttctgctgggtttgggtttggtttgcgcttgtttctcttgctccttgaggtgtgaccttagaatatcagtttgtgctctttcaatctttttgatataggtgcttagggttatgaactttcctcttagcaccgcctttgctttatcccagaggttttgataggttgtatcattattgtcattcagtttgaataattttttaatttccatcttgattttgtttttgacccaatgctcattcaggaacaggttatttaatttccatgcatttgcatggttctgaaggttccttttggagttgatttccagttttattccactgtgttctgagagagtgcttgatataatttcaactttcttaaacttattgaggctcattttatggcctgtcatatggtctatcttggagaaagttccatgtgctattaaatagaacgtgtattttgcggttgttggatgaaacgttctctatatatctgttaggtctatttgttccaaggtatagtttaaatccattgtttctttgttgtctttctgtcttgataacctgtctagtgctgtcagtggagtattgaagtctccactattattgtgttgctatctcatttcttaggtctattagtaattgttttatatatttgggagctccagtgttaggtgcatatatgtttaggattgtgatatttttctgtgggacaaggccttttaccattatgtgatgtccctctttgtctcttttagctgctgttgctttaaagtttgttttgtctgatataagagtagctatcctgctcgcttttggtgtccatttgcatgaaatgcctttttctacccttttaagtttatgtgagtctgtatgtggtaggtgagtctcctgaaggcagcagatgattggtgagttcttatccattccgtggttctgtatcttttaagtggaacatttaggccatttacattcaatgtagtattgatatgtgaggtactgttgcattcatcttgctctttattgcctgtatgctttgatttttttgctttttgttttgcttcttaacatgtatttttgttttataggtcctgtgtgatttatgctttaaagagtttctgttttgatgtgtttccaggatttgtttcaagatttagagctccctttagcagttcttgtagtggtggcttggtaataggtgaattctctcagcatttgtttgtctgaaaacaacagtatctttccttcgtatatgatgcttagttttgctggatacaaaattcttggctgataattgttttgtttgaggagactgaatcccttctagcttgtagggtttctccagagaaatctgctgttaatctgataggtttttctttacaggttacctggtgcttctgtctcacagctcttaagtttctttccttcctcttaactttggataacctcatgacaatgtgcctaggcaaagatctttttgtgatgaattttccaggtgttctatgtacttcttgtgtgtggatgtgtaggtctctagcaaggccaaggaaattttcctcgattattcccccaaatatgttttccaaggttttagaattctattcttcctcaggaacaccaattattcttaggtttggttgtttaacataatcccagacttcttggaggctttattcatattttcttattctttttctttgtcttttttggattgggttaatttgaagaccttgtctttgagctctgagtttctttcttctacttgctcaattatattgctgagactttccagagcattccacatttctaaaagtgtgtctaaagtttcctgaatttttgattgctttttctttaagctatctacttccttgaataattttcccttcagttcttgcattattttttggatttcctggcattgggcttcacctttctctggtccttccctgattagattaataactaaactcctgagttctttttcaggtaaatcagggatttattcttggtttggatccattgctggtgaactagtgtgatttttttgtgggtgttgaagagcgttgtattgtcatattaccagggttggttttctggttccttctcatttgggtggcctctgtcagagggaagatctagggctgaatgctgttgttcagattcttttgtcccacaggtgttcccttggtgtagtaccctccctattttcctgtggatgtggcttcctgagagccaaactgcagtgattgttgtctctcttctgagtctagccaccccgtgagactgcccagctctggactggtactgggggttgtctgcacagagccctgtgatgtgaaccatctatgggtctctcagccatggataccagtgcttgttcaggtggaggtggcaggggtgttcaatggattctgtgagggttcttagctttggtggtttaatgctctatttttgtgctggttggcctcctgccaggaggtgacactttccagaaagcatcagctgtagtagtatggagagggcctggcagtgggcagtgccctagaactcccaagattatatgccctttgtcttctgtttccagggtggatagggaaggaccatcaagtgcaggcagggctagacatgtctgagctcagactcactttgggcaggtcttgctgcagctgatgtggaggatggggttgagatttccaggtcactggagttgtgtacctaggaggattatggctgcctctcctgagtcatgcaggttgtcagggaaatgggggaaagccagcagtcacagacctcatccagatcccacataaactgaaggtctcactcccactgtgcccccacccccagtagccccgagtctgtttcctggcggagggtgtgacaggctagaaaacttgcactgggctacccacctcccagctgcgaaagaaaagggcttggtttttcccctgcctgtggagtctgcacaccagatttgcaccctcccgtgacttctgagcaggaggcttcccacccttcaaattgttacaaagttcagctagagattttcttcctcctgtggagtttatcccctgctcctctggtcaccctcccaatggatccctgtggtgccaggcaggaatgggctgctagggtacacagcaagctcccaaggcctttctgctgcttcctctcccctgtatttcacttggttctctaaattgactcagctccaggtaaagttggaaacttctcccacaaacagaccttcagcttctccattgagggtctggactggtactgggggttgtctgcatggagccctgtgagaggagagtctccttttcccatttctgcagttagggcactcacagtatttggggtgtctcccaggtcctgcaggagcagtccacttccttcagagggtctgtgggtcctcttgggatttttggtttgtaattgcagtcgttctggagctaaaattcacagtgtgagcttctgtacgttgctgtctctggagctgtaatctagtcctgcctcctgtctgccatgatgatcccacttgagtttttaatatttagtttctggtaggcaacatatatttggaccttgttttttcaatctactctgacaacctttttgtttaccttgtgtttttaaacaattaacatttaaagtgattattggtatagttgtataaatatctaccatgttcatatctgttttataataattgcatttgtttctttttttgttccagtattttcctgccttgtctgtttttaattgagcacttcatgtgattttattttatctcctttcctagcaattacatttcttaaaaatttttttaatagtggtctagagtttgcaatataaatttttaacttgtctatatccagcttctaataacactctaccattgcatctgcacttcaggttcttactcataacagtatccctcatttctccctcctatctgttatgacattgctgtcattcatttcacttattcatattctataatcaaccaatacattgttactattattattttaagtaaacagttatcagatgattgtatctccatttattccttctgtattgattttcctttacatagatttgagtttctgacctatatcattttcattccccttaaataatgttttttaaaaaatttctgcattacaggtcttctggtaatgaattccctcagggtagttattattattttttgcatgaaggaagtccttctcttttacttttgaagaacaattttgctagatatagaatttccaggttggtgatttttgactttcaacactttaaatatttcatttcattctcttcttgcttgcatggtactgatgagaagtctgctgtaattcttaaacttgtttttctataggtaaagtgtttgttccttctggcttcttctaaggttttctctttgtagttggttttctgcagtttgcatatgctatgcctacaagtagtttaagtgtttatcctgcttttctctgaacctcatggatctgtggttttgtgtttgtcattactttcaagtatttcttctgctccactttttcttctttttctggtattcaaattatgtatgttacactttttgaaattgtcccacagttctttaatatattcttctgttttttccactatagttttttctttttgcattttagttcttgaagtttatattgacatatcttcaagctcactgattctttttatagccatgttcagtctactgaggagtccataaaaggcatattcagttctgttagtgtttgatctctagcatctcctttagattctaagacttttcatagttttggttacattagtcatctgttcttgcatgctgtctaattttatcattagacatttttttcattaggtgggtaagcttcatgagtgatggagtcaaggaaaactttctagtgcatgtaaaattatatcaaatagggagttgccatctccttataaaactaatctgggtagaagctgtcatttatgaaagagaggctgatctattacactcaacacaaaagctccctgtttgtccataagctgttcccataagtgactaccttaagggaaagaagcacctgtaatataagcattcacatgtaggcttcagaagtatggaagcctacgtactggaaaattaccagcttagaactgtgattactggtaagatacttgatgtttatgaacatcagagaaaactttgaaacagctttttatacatggttaggaaatagtcattcttgtatttgcccaatcctagcttcaaattcaacttttggtgctaagtgtgggtaaaaattggtacccaccttgatgcttttcatcttgcttctgatagtactacccttggaagagactgaaaaataattgagaagttaaaagccttctattgtgactaagaaatattaatacaatttattgaaaaaacgcataggtagaatgaatgtaatagtttttaaaaaagagaatttgaggaccaagaggaccaattaggctaccaggagacatcctttggtcagctctcctgagggtaaagttcataggccaggtcagtacctcaggaagcatcctttccttctgttcagagaatgggttggcctgaggtagaagctggctttggttcaaactttaggcagacaaatctttctccaggggtcttcttgcctctacttttcctacttcctagcatggctgccatgcacaacatctgagtttgcccttcttttcactatatcctccaataatccctgttcagttatgacagtgaaagagggaaacaaatggacaggacattacgtacatcttgtgtacgtttgagaactattagcattgtagtcaattgtggatagaaaatgtatgtatgatgaatatctaaatattgaggtctaggggtgcgtgtgtgtgttgctgtgaatgtttctggtgttcattcccacctgtcagttatctgcttaattgtcggttaagggctaatttaatttatatcaaaaagtcagttttcataggttaagaattcaagagcaatttatagttttacagaagagtcttgaagatagtaggtgaaaaataatctcaaatggtcaaagttttagcatcaggtagcacctctagacccttacctgaagaatgcctctcctaaatctgaaagggttgaccaggtgtgcgcctttaggacgatgcaaggcaagaaggcagggaagaatggtactcctagtcagtcagatcagacggatcaatcttggtgatgaatggggacagatgtcttaggtgggccaccccatatcgctccaggaagattggagggcttttaaggtagtcaacccacttatactaaggccactgttttaaacatcatgagttgtatcatgtcattcctctgcttaaagccctgcagtggttccctgtttcacccagagtaaaagacaaagtcgttttaaaggtttaagaaagctctgtacaatctgatcctcctgacctctctaatttcatctactactcctttctttccctttcactctctgcttcgtgtccttcttgcttttcctggaacgatccaggcatgccccttccccatgacctttgctctggttggttttctctgcccagaatacactttccctagatgtccacatggctaattctcaacttattcaagtctttgatcaaaagataccttcccaataaccaatagctaccctattaaaactccaatgtcctggcactcgtttatcatgctgaattcattatttttttctatagctcttactgcattctaacatattacataatttacttgttcattatgtttgttatttgtctgtgtttttctattaaaaggcaaccttccagacggcatgaaataatattcctggtgcctagaccagtgcttggtatggtggtagatggttaatagttatttgttgaatgaataaaggggcgaataaatgcatgttagttacttgtcttctattcctttctaggaagtgttttcttctagttttcctataatccaccatcttaagccagctcacaattttgatgcaagcttgtatgagacaaaaagtaagaaagtcaaagaatctgagaaaactccagaaagcatgttggtacaaagcatgtttgcactcagagcacataacgttttaatcctccttcctttaggtgacaaaattatcttaaaaattattttatatgaataatatataatatgcataataatggccataaaggaaatacaaattgtggatttttttttttttttgagacggagtctcgcactgtcacccagcctggagtgctaatggcatgatctcggctcactgcaacctccacctcctgggctcaggtgattctcctgcctcagcctcctgagtagctgggactacagccatgtgccaccacacctggctaattttttttgtatttttagtacagatggggtttcatcatgttggtcaggctggtcttgaactcctgacctcaaatgatccacctgcctcggcctcccaaaggcctgggattacaagtgtgagccaccacacccagccaaattgtggaaattttttactggacttcatatatataattatgcttttaaaaagtaaagaaacataaaaaatgttatgtacataaaaggaaaaaagtaatggattggtaattttaattacattagtataaatttttgcacaaagggaaagaaccaattattggtttatgacagtaataaataatattaaagtttattaaataatcacaagaataacaaaagaaatatcaattttaaagatattattaaagtttagcaaaatcatgtataaagtttacacttaccaataaaaatactacatctcacattctgtacttcatttcgtcactttacatttttaaaaacaaaaattccattaatcatgtggaatgatgaatttacttgtttcttttttttttgcaagtaatatcctataattatttattttgaatcttctgtttaaatgtcagaatatggagtatcataagttttttcgaagtgagctggaatgattcccaaaccttcacaaacttgcttatggaacacatatgtgtgtgtccaagactgcatgtgtctggagtcagctgtataactgggatttctctgaattagcttacttgtagattataatatatacaggcataccttggggatgttgtgggtttggttccagatgatcacaatgcagtgaatattgcaataaagtgaattacacaaaattttttgtttccagtttatataaaagttatgtttacactatattatagtctattaaatgtgcaatggcattatgtctaaaaagtaatgtacataccttaattaaaaatttattgctaaaaaatgctaatgatcatctaaggcttcagtgagtcttgacttgatgttgatggctactgactaatcagggtcgtggttgcttaaggttgggatggctgtggcaatttcttaaaataaggcaacaatgacgtttgccccatcaattaactctttcataaaatatttctctgtagcatgctttgctgtttgacaacattttatccacgttagaacttccttcaaaaattagagtccatcctctcaaaccctgctgctgctttataaattaagtttatgtcattttctaaatcctttgttgtcatttcaataatgatcacagtattttcaccaggaatagattctatctcaagaaaccactttctttgctcatccataagaagcgacttctcatctgttcaagttttatcatgagattgcagcaattcagtcatacttaaggctctacctctaattctagttctcttgctatttgcatcacatctgcagtactccaccaaagttttgaacctctccaagttgtccatgaaggttggaatcaacttcttccaaactcctgttaatgttgatattttgatctcctgagtcacgaatggtttttttaattcattttttttatttcaatatgtttttgggggaatagatggtgtttggttacatgaataagttctttagtggtgatttctgaaattttggtgcacccatcacccgagcagtgtacactgtacccagtgggtggtttttatccctcacccttctcccaccctttcccctgagtccccaaagtccgttgtatcattcttatgcctttgcgttctcatagcttagctcccacttataagtgagaacatacaatgtttggttttccattcctgacttaacttcacttagactactggtctccagtcccattcaggttggtccaaatgccattattttcttcatgtttatggctgagtggtattccatggtatgtgtgtgtgtatcacaatttatgcactcattgattgatggggatttgggctggttccatgtttttgcaactgcaaattgtgctgctgtatacatgcatgtgaaagcatcttttttatgtaatgacttcttttcctgtgggtaggtactcagtagtgggattgctggatcaaatggtagctctacatttagttctttaaggaatttccacattattttccatagtggttttagtagtttacatttccaccagcagtgtaaaagtgttcccttttcaccacatccatgccaacatctattattttttcattttttgagtatggcgattcttgcaggagtaagttggtgtcacattatggttttgatttgcatttccctgatcattagtgatgtgggtggggcattttttcatgtttgttggccgtttgtatatcttcttttgagaactgtctgttccatgaatcacaaatgtttttaatgtcatctagaatggtaaatcttttccagaaggttttctacatattttgcccagattcattagagaagtcactatctatggtaggtatagccttacaaaatatatttcttaacaataagacttgaaaattgaaattattccttgatccatgggctacagaatggatattgtgttagcaggcatgaaaatcacagttatctccttgtatatctccttcagagctcctgggtgaccagttacattgtctacgaacaataatattttgaaaggaatctgttttcctgagcagtaggtctcaacagtgggcttaaaattttcagtaaatcatgctgtaaacagatgttctgttgttcagactttgttattgcatttataaagcacaggcaatgtagatttaacatcattcttaagggccctaggattttcaaaacagtcaatgagcattggcttcaacttaaagttaccagccacattagcccttaataagagaatcagcttgccttttgaaactttgaagccaagcattgagctttcctctctagttaatcctggatggaatcttcttccaatagaaggctgtttcagctacactgaaaatctgtttagtgtagctgccttcatcaatgatcttagttggatcttctggataacttgctgcagcttctacatcagcccttgctgcttccccttgcacttttatgttttggagatagtttctttccttaaacctcatcaaccagcctctgcttcaaactttagttctgctggctcctcacctttctcagccatcatagaattgaagagagttaagatcttgctgtagattaggctttggcttaagggaatgtgttggctggtttgatcttctgtccagtccactctaaccttctccatatcagcaataatgctgtttcactttcttatcattcatatattcactgggtagcacttttatttccttaagaattttttcttcatattcacgacttggctgtttagtgcaagaggcctagctttcggccagtctcagctttttatttgccttcctcattaagcttcctcatttctagcttttttttttcctggcttatttttgatttttattccacatagaaataaataaaacattttattaaaagttagaggttttttttttttttatagtttctgcagtacatgtgcagaacgtgcaggtttgttacataggtatacatgtgccatggtggtttgctgcgcccatcaacccgtcatctacattaggtatttctcctaatgctatccctcccctggcccctcagcccccacccgacaggcccccgtgtgtgatgttccccttcctgtgtccatgtgttctcatggttcaactcccacttatgtgtgagaacatgcagtgtttggttttctgttgtgttagtttgctgagaatgatggtctccagcttcatccatgtccctgcaaaagacatgatctcacacttttttatggctctatagtattccatggtgtatatgtgtcacattttctttatccagtctatcattgatgggcatttgggttggttccaagtctttgctattgtgaacagtgctgcaataaacatatgtgtgcatgtgaatgtgtctttatagtagaaagatttataatcctttgagtatatacccagtaatgggattgctgggtcaaatggtatttctacttctagatccttaaggaatgaccacactgacttccacaatgttgaactaatttacactcccaccaacagtgtaaaagcattcgtatttctccacatcctctctaggatgtgtttcctgactttttagtgatcaccattctacctagcgtgagatggtatctcattgtggttttgatttgcatttctctaatgaccagtgatgaagagctttttaaaatatgtttgttttctgcataaatgtcttcttttgagaagtgtctgttcatatcctttgcccactttttgatggggctgtttttttcttgtaaatttatttaagttctttgtagattctggatattagccatttgtcagatggatagattgcaaaaattttctgccattctgtaggttgccttttcactctgatgatagtttcttttgctgtgcagaagctctttagtttcattagatcccatttgtcaattttggcttttgttgccattgcttttgtgttttagtcatgaagtctttgcccatgcctatgtcctaaatggtgttgcctaggttttcttctagggttttcatggttttaggtctttcatgaagtctaggttttgatttatagtgagaggcttcctttcacttgaacacttagaagccattgtatggttactaattggcctaattttaatcttgtgtctgagggaataggaaggaaaggtctgagaagaaggagggagatggaggaatggctgatcagtggagcagtgatgacacacacaaaacttattgattaaatttgccattttatatgggcacagttcgtggtaccccaaaacaattataataattccatcaaaagtcactgatcacagatcccgataaaggatataataataatgaaaaagtttgaaacattgcaaggatgatcaaaatgcgacacagagacacaagtgagtacatgctgctggaaaaatgacagcgatagacttgtttgatgaaaggttgccacagaccttaaatttgtgaaaaatggaatatctgtaaagtgcaataaaacgtatgcctgtataaaaggatgagcagtaaaaacgtgctaatttaaagtttgcatatatattattaaaacccaacagtaaccacaacaattgttagaacttatacaacaaaattttggtggggagggaacagcattttatcacttatattagttagaattgttggcatgtacatgatgataaggagcagactggtttttggtcagtttcattattaaaactttattacttgtataaagtgtttgttatgtttgtaaattctctacagacagggtgcctcctttttgcctgcagattgcccccactttccaccttcagccacactgggaagccagactctaaaccttctatgcccagattttaaaaggatgttttagagttagtgatttcctactcttagtgaagaaactttcaatttaattcaactcatgcttgcagatcataatttttaatccaaacacaaaaggagcaaaaaaagaatcctttcctttgatcagggtaaagtattgtctggaagattaaaataagttacaccagagggcacttgaaggtgaccaatactagtttaaacaagttatttaagaacaaatattcagatcctttaaaaaaatttaaactagaacaatccaggatattttcataagaggactccataaggatgtgagagtgcaaaaagctagcattttcaggtatcttttcttctctgtaatattttaacttgtgagatgagattgagtttttgttataagaaagcaacattctctctcatattaatttgttttaatatttaaaacattaattgttgcacatactaaagagctttgtgttcagtcccatcgccgcctttcctggctcctggaatgttttgtgcatgagccaatctttggttgatggctccatcccagcactcatgtggaccctgcaacaagctgaaaacctggctgattttgtatggccttcatttatcacaacttcagaaacgaggtttattaatctgagttgctgagttcctggctggcaaagaaaggctctaaatttatgtggcttaagtgaattccttaatcttaagaatttaatttctgagccttttatgttttctaatcttgagtgatctggggccttgtgcataaagaagaaggaaaaaaaatcaccagagagaagaagcaggaggtaaagaggaatgttaagccaagatatttatttatatttattgcttcacagtgggaaaagtccaggatctcaggattaaagtatcctgtattattttatatagctagaggtgggtgtgtgttttaaaatcattccattaacccaattacaaaggagtcattggtgatgattttcattagtagaaattcttttcccttgcgaaaaagcatcctatttatcttcctgattctcctgatactttataacacacatccttattttattcacagattttgaaattgtcagaaaactgatgtcagagctcttggatcatgttgcttcaactctcccatgcccagatttctctgattcccccactcctaccagtaccaaaaacacacctccccaaagttagcagcttcttttgggatctcctttcactttggctatatatggcagcaaagagaataaagaagagggagtaaagaggtggaataattcagtgacagtgactctgatataaaaggaaaacagctgaacagtggcatgaaaccagtttaaaggtgtaaggcaggctgtgggcaatttcttaggaaacaaaggtgaagaaagtaaaaggccacctttgtgaaaaggcagcaagagaagactctgtcaacagtgtgaagaagttgcggtgacaaagcaccatgtttgaaaaattaggtcagtattaggaagacaacatgaggaagataacatttaaaatgaaaggaaaaggcaggtttggaatgcatgctgaaggtttacgatgtgaacttgtccaccgatgagtctgccaacccaggttgggattctggattatcatggctactgagttggaaaatatatcattcccaaatatttgaaagcttttgatatatatttaagagggctttttaggcagtaaaatgagcttaaaaactaatttcaatatgtgttttatcatcaaaatgtcacccttttagaaagggcatcccagtccactgtaccaaaaatcatattttccatcatttttactcattttagttttgccatagcatttagcactagttgaaacctgaatatatatatatatatatatatatatatatatatatatatatatatatatatctgtttacatgtttattatctgcctctcctgctagaaaggaagctccatgagggcaggggctttatgtttttcaccgttacatcctcaggacttagaaaaaaccaggtatatagtggaatatttgctgaataaatggtaatatagtacctaacgttgactgaatgcctagtattagccaatctcagactcattcaatactgatataaattctaataaataagtactgttattagtcccattttgcagatgataaaactgaggtctgagaggttaagtaacttgcccaaggtcacctagggattggtggaggtgagataataatttctaagaagagttccttttgggccaatatggttaagacagactttaaaggagaggtgaaacaagctaaattttgagatgagtgttttgaagtggagagagggccaggtactctatgatagtgtgaggaaaagctgcctacgatggctatgaaagaggtttttataaagatttccaacaaggtgtgctgagaaataagattggaactctccaaagtctgtgtgtgtgaaggccagtccaaactgaatgaatacattgttcaagtttcaaaagaatttaagaaatagtttataatacagatctttgctgagtcagattgaattgttttcctaattacagtgaattattgagattttactgtctagtcccagttcagaaaggaccacaaacacatcacttgcagcctttacttttagggctaactccaggcaaaattatgaagtaggccattgttattgtattagtcgttcttgcactgctataaagagatacctgactctgggtaatttataaagaaaagaggtttaattggctcatggttctgcaggctgtacaagaagcatgatgctggcatctgctcagcttctggggaggcttcaggaaacttacaaacattgtggaaggcaaagggggagcaggcacatcgcatggccagagcaggagcaagagagtgaggggggagttactatacccctttaaatgatcggatctcacaagaactcactcactatcctgaggacagtgccaaggggatggtgctaaaccgttcatgagaaattcagttccagatctaatcacctcctgccaggcctcacttccaacattggggattacaattcaacatgaggtttgggtagggacaattatccaaactatatcattcatcttgctgatattctctgctcattcctcctctgctcctgtgtcagtccaggtccctatgggaaacagcatctcccaaaggggtgcttaaacattttttttatcattaaaaaatttctttatgatggaaaaattttaaacatgtgcaaaagtagagggaaaattataaagaccctgaacgcttttactttgatgattaccaaatcatgatctcttagctttgacggttatcaaatcatgaccaaacacgcttcatttaaatatcactttgtccctaaatacttcaggatgtatctctaaaaggtaaagcccacttgaaaaaataatcacagtatcattcttatacatggataaataattctgaagaaagtggttatggaaggatttatttataaaaggaattaagggaattcaacatgggatggtgaagcacccatgccctagttacagggggaaccccctaccacctaggcttgaagaagctgctgaaacccatggaggttgtatttgtaggagagttctgccaggcaggagctgtggccttcagcagagaaacagtcactgccaacccagcagggaaagagggtgttatacgtaactcaatttgtctttcctactttctcatccctggcaagtcctttgcactgattaaactcaacaagaagccagagagaagggcaggctgttatggcccctgcctgataagcttcctgaggcctcaccagaaacagatgccaggtctatgctccctgtacagcctgcagaactgagagccaattaaacctcttttctttgtaaattacccagtctcagatatctctttatagcaatacaagaacagcctactacaacccctatccctctgttacacaccttcttctgaagatatcttttcaggcttgcatttaccacactgtaccccagaccccggatctatttctttgggccccacccatcatccacataactaaatacaataatctactctgtgaacagtgataaggagtagagttagatattttggttaagaaagccctttcccttctaaaggcattcttattttcatccaatcttgatggtacaaaacaagagctatattttaatatgctagcctcagacattgataaatcatggcatagggaagctactctgactgcctttcaaacttgtttcgctttgctgtgttccaattaggtttaaaataatagatgagaaaaagtagttctggttcatttaagacaagcctccagtaaaaggcagtttggagttcgctgttggaagccagcaagggttataaaatccagagcctagttaaataaatccttttactattaactccctactcagacaggagggagaaaccagaatggttagtctagcaaaaagagagaaggggagatccttatagttaatacttggttacccaggcaaccattccctgactgcaagaaagccatcctgaagtcttgattagatggaagaaaaaggcctgggatcttcctttctgctgctttctcttctggcctgggaaaagaggaaccaagaaataggaataagtgggaaaaagccctgaacggaggtatgggtgagagagaggcggtggctgagggaggaaagctgtcttttcactggtgccttcttgttagagctgaggaaggggctgccccaaaggcttggagcctcttagtctttccaaaccacagatcccacctgtagctcctgttctttgtggcctggaaggccccagggctccaaaatatcttagttctgggagaaaaccacagacctggaagcacagaattttcagaacataagaggatcttacaaatgctatatagttcaacattgtataaccagaagagttaaaggacccatcaaggatcacacatcttgacaggtgtgtgagcaatgagtaatattccattgtgttcactctaacatccctgtgatcagcatgtgtcttgcagttgatgtgatgaggaagtactgagttataatttacctgataattttttttctctcatagtagcacataaaataagggtacatcgtataatcagtgatccttaaatccactgaaatagggtaaacagtgacagaatagtgtgtgtttctgctgatgcaccctttaaatctttttttatacatatatttttattatactttaagttctagggtaccctttgaatcttgtttgtcattatagttgtctttattcatgtcttatagaaattagttatttaatagtttttttggtagaaaaagtgcattcaagtaaagaaggtatattttctttcagatatcatcgttcatgtttggaataagtcttttgcttcagcagctctactgtacacatgcatgcgcacacataagtgtatgcatggacacacatgcactaaagtaatgcaattctcacatcagccccctgcaattgcttccctagctagagctgactgagactgagtgtcagggtttggtggtgattggatgatggaagaatcaatttgtaggagtataggctggaaatgggagggaaaatctaggactggaagaaagattctatctctccagctgttccagtagagcctggacctccctatctcacagatcagcttcctcttttgtgcatcttgttttttctaaatcttgatgtttccctcctcttttccttctttgctcttctctcaaagatcaaagggccacacaggtgggatttatcttgtgaagacaggaacattatgtagtttgttgttttcctacctcaggttcatggttcttaaaaatttgtatagtcgcgtttcttctttcaattaaaattgtttttgttgtaagtaaaaattttaagtgtatgataaagaatgtttaagcaactcggaacagtacagagaagaaagtaaaaagaatgacctctaatcccatcatccagaaataaccatcgtccttgactgtctttctcttctaatctgagaactcttgtttctactaagaaaagaccactcaggctctgctttttggtgtttgatccacttttctgtttcctgggaataggctgggagccagagagctcagtcgaggtgggtgcaggagttagtctggattctcacctctgagagaggtaatgctaaatgttcacctaagggcggggggaggggggtgacctctatccctggaggcgtccccacttgcttctgatcctccctcaattcatcctgtagcctagaggcttctcttttgccagaaaactgcttttttctccctagcatcccttccacagctccccagaaaagggaaaaaggcccaccctactaagttcgcctctttccagatccattattgatgtgagggtgcaggattttgcagctctgctgtgtaacttgtgaggggtgtgtgtgtgtgtgtgtgcgcgcgcgtgatggagcctccttacacccttacacaggccgccctgctctgctctggaatcttctttgtttttcctcacccattattttctgaggtaatggccttggcttgtggctttttctttgtttgctatttgttggtgagtttttgttttaatttttatttgctagtttttgtttatcttattaaatttggatagagggacatgacatgagtgagtttcttctatccttcaaccctgcaagtcccgttggcaggtttccactcccagttaatgtgaatttggtaaactcactaatcaaacaccctccttttttgcaaggaggggttataaagacctcagagtgtatattggtggctggggtttaatctaagtaggtgtatatatgctacctctccttttatgtggtattagattagtgttttcttgaaagagatgtatgttaatagtctttaaaataccattttctagttttcttatgcttaggcaatgcttttataaaacctctctattaaacatattcttttacattccattacagtatttattctttagttttgctttcctactttagaagtgaagtcaattttcagaatcaccttttatttgtgaaaataaagtaggatgcttcagttttgcgagcatgttttattgcaatttatgtcagtttttcagggaggaattcagcatttggattattttgtttaaattttaggatgctgtaatttaataaaaaccaagtctttgtctttggtttatttgccatttaaataaccgtaactcttatgaaaaacagtgtaaagcttcatggtgctgtatacatgtatagctagggaagaaaagcctgtggcaaaatgactgtaaatatgatttactaaatgaggattatcttaaggagatacacacaatttaaaaattacaatttttttaaagttcaactttcagtcctgtcattttttttttctcccagaaatttacatggctttttattgccatgtatttattccagcatgcttgacaactgtgttgaaatcatgctgcaagcttttatacagctgtttcagcagtgccatacttttaaagttagtagttgccttgtctaaaagctttgccagtgtttcttttctcctgacattctatgtaacaattaattaggtcatctttaaaaatagatgctggtggctaaactcaacatacgctcagtgtttcctttctattaattttctgtgctcacaagtactttaccttgcatcttattatcaaacagtgactaaaatgcttaatttaaatgagtaattttagacaagaagaactgtatgtagatcagatctgttattattagttcgcacacaacaaaagtgatgtggagaatacccgggagagatgaaatcaaagccttcgtttttgttttccacagcctggtccactgagcagctgtaaccacttgcacacagcctgctcttaccaaacctgaatgcaaggaggaatgcatcagcgtaatttccatacaggctttctcctggggagcatgcttcatggcatattgggggaccaagaggacttgcttggagagttttgtatgctgtcactccaacttaagttagggcccttctagaggtggtgaggcagatagagaaacagaatgaaaacaaccagttgtttattgctaccacctacagctagggggcagtaaaaagaccaggagagcatattcagccttttttttttttggtatagatggtgtgatggtctgaatgtttgtgtccccctacgaattcacatgttagaacctaatacctgatgaaatagtattaagaggcggggcctttgggaagtgattaagtcatgagggctccactgtcatggataagattagtgcccttataaaagaggctcccttgctccttttccaccatgtggtgacacattagcaaggtgccatctttgaagcacaatcaagccctcacgagacactgaatgtactggtgccttgatcttggacgtccctgcctttgaaactgtgagaaataactttctgttgtttataaattacccagactaaggtatttttattatagcggcagtaatgattgaagacaaatggaatgtcatgtcttcacccaaatgtctggacaaccattggattcctgagtttttttctgtctccactgacaagagagtggacggtgaggatgtcctttgtctgaactggaaaagacaatttgtggctggcctttcagattaggacagttctgagagctattccatgtcctctctaggctgacaggcttttatgcctgacctggtctcaatggtgtactctcttgaggtggggtaaggacatctctgaaaacagcaattttaggactattagagctgacaaagtctgggtttacttgtataaaatctttagttgctatcttgtaattttttttctattctctcaaatgccaataatgtctgactttcagcctccacccatctttgatggggttgtttgttttaattagatcttaggtactgagagttatgttaatcattatccttagtttagagcacattgccatcactgattggtgcaaagccttcttcttgtcttattttctttctctttcatcttctctgatcactgctccaattcccttttctcccttagcattcactttggtgtctttgatgtaattgttttacataatgtgtgtaaccttgttaagtctgtggtattgttttgcgtgtgaatgtgtttttaatttttatcagtggtatcgtactataaatcttgctttgttttctacttttatccatgtagctatgtttatcattaatacttggttaggctgcagttacaaccaacttacatttttgtgtcagcaacaatgtatatttttttcatccatgataaaatgggttggctgtggttcttcaaaattacagtattagaccatccactaagtcttgttgtgttctcattaataagggagaacacctattactatatcataaatttgttttttaaaaaatattttggtaactatttttcaacataaatggttttatttataatcttatgtattttgtgttatgcaattaataacaatttttaaaattttttcattttagaatgagtccatagaattcaccagattgccaaagtgattcatggcaccaaaacaagttaagaaccttcagtgtagtctgttagtccttgattcttttctatacatttgacttcttttttccctctcttctctcctgtcctcttttgtcctcttctctcctcctttcttctccccatcctcttttctttctttttctttctcctctttcttatttgttctcatttccttgttctttcccctccttccctccctctctcccttcctctcttccttcttttccttgttagacctttaatctatagtttttcccctttctttaattcatagaaattttcaggagttatttcctcaactgctttattatcctctcctctgagactgttgttaaaaagatgtggacacttgtatattccacagatcttaactattacactttatatcttttttcttttccaataccttatgagataatttctgcatctgctctcaatcattgtttggttgtatccattctgctatttattccatctaggaagttgtttcaactttatattcttcatatattgtttttcttttcagatttttataacttcttgttcctgcttcatgttatcaataatctctcttccctctttgatgacatttattttgcttattttaacttctcgatttctcgttttcattagttctgatttattgggtgtaagttgttcagtgtattgcctctcatcatgactgctgccttgaaccctatcccactttgtctgcttcaggtatcagtcatatagaggaagagccagagccagatcctagtctttgtcattcctggtgagtttaagaagaggagggtgatggagtgccccaggacacagagttcatatcaccaaagcctgtacttgaggttagcatttgctgcctctttataagaaactctgctcttaggtaaaactgtctatgcctctgctctgagcctgctctctttttacaacttagtttgctacttggttgtcaagtcctaagctttgggctgtggagagggacagtgaggtggaggaaccgtttaggggtaggctaatcttctcccaatgcagcccagattccagctctgccccaaatataccccataactgctacgaaggtgggctggtgctgctattcttccaccccagtggtaagagggcaagtgaagttgtacagagcaaagagaacacaactcatatgcatagccccagcctatccactcacatactgcccctccttcctccacactggctgccacttttcttccacgcttgcttacgaccaatctctttctcctcagagtttcttcatagtctttatcttaggtttccagatttatacccttgtcttttatgagtaactactgctagaattagccacatcttacaacaatgggctctgggggttattaaacattggcagccttcaagagggcgtcaattccaggttttctactaccctctcctgtgctgagccacaagtttagccttctgttgttttccatgttaagatgttccttgattttcttccatgagcacaggtccctagagacattaaatcaaaattagcataaggaggacaggactgatttcattgtctttctctacttcttatataatgctaacatgtgtttccaggctgtttgtgtgcttattttataaacatgtttattgagtggaattttaaggtcttcacatggaaaaacttgtgaataaaacttttgtgaaccgaacttgctatttagttccagataagttctttctgtgcttttctttttgtttcctgcatggttcaatatggttccaattgccacatatccacctcagtccacttggtaactcagcctttcccttctcaagggttgatggtttagaaagacattcagcatgcagatgggtggggtatgcaatatatctctttgacctccctcatgtatttgttcaatgaagtaaatattttggaagatattttattttaaaagatcgatgagagttacgttggatgaatcaaagaaagaactgcatcctatttcaagaaaataaatttctccaaacaacatagctatgattctagagagtataaaagcaccagaaatgctgtgctgagttagatcagaccaactggatgtatcttgctcggtgctccagctacagtggcaaagatacaggtggcacttcgtgagtaagtgtggggtgggcatgccctgctgacaaagtaaatagctctaatttccacccagtgacatgctggaaccatcatcctagattatagctaagtcctccttggaacgtacttatactttcaagtctgtaccaattcttacaataaaacgtttcatgtttgccacctgctgtgtaaagtggcactccttttatttattctacagccaccttcttcaggctttcaggggtgcctttaattctaatatttgtgaatttggagaatgaacagtcttatttccataacccgcatgtcttttgttatattttatacatctttaaatcaatatgaaccttcttgtttctagacagtttgagttcaaaaactgatagaataaagaaatcagttttcatttaaattatttctactttttagaaattttattcagactccagtagtgcatacatcgtatgtgttcctgaaattagttaaaaaaaaaaagttatagtccatgggttggaaaaaggaaatcaaaaagaattgatatctaagaaatgccatttgtctgcaaggtagatgaacagtaaaactcaattcaacagacatgcattgagaatctatgatgtgccagttgcttttcaagttatggggaacaaaggttaaatgtagtttcttccatgcctaaagccacgttcagggacacagtaggggtgggcttctttactctgtgaaaggggcgggacaggctttgtagaagaagagacatctgaggaggaggagtgggaatttataatggaaggggctggggagagaaaggactccagtgagagagaacatcacttacaaagcttgggacttacaacatcacttggtgttttaagccaggaagtactttggaatagctggagcataaggtgcaggaatggaagtagcaggaagcagctggagggaactacaggtggggaaccgggactggatcctgagcaagagagctaggcgtgatttattatttttctgcctgagttccaaggaaaagtgccttttgcaaagttggaagctggagtacagaatgacaggtttcctttaaagcttttccccaaactccaggttgacaagcacagttttcttacagaggcagtgatatatggtgctacactgattcttttgatcctgtttctagaatcctgctactctcaaaggtggttttcagcagaggtgactgggcagccatctcatactcaccacccgtgctcctcacgtcccctcacttgtacctctcctcagctggcttcctgtgtaccagtgacctaccttgaatgtaaaatcgaggcctctggtttttctttatgtatatgttggccttcactatcaaatcaattgtgttttgcaaacctaaaagaaggccagtatttatttaccatttactgtttgtgttcagacaattcagatatttgccatttctaattgagtcaaatatgagcatctaccttgtgccaggagctgtgctaggtgctggtgacacaaaatgaattaaatcattcagtagtagggtaaattgacagaaatggattgagagatttgatgcttctcaaagttcatagtcaccaacttcaaattgcctaattatccgctatttcccaattaacttgctctaccatatcccaaagtgactctttcaagtcaccactctccccacttccgctttctcaaaaaatgactttctactacttcacagaggaagtggaagatatctgacccataccatcacaacttcctccagacctttcagcctataggctaattcatcatgtgtccctcctatcaaggtttcggctgtggtctggatttgatcttctacattctcatactccttgtgctatcaatttttttataaaattcctttcccctttacaacatttctgactgccagggacaccaggattggacttgtactagcttggtatagcacttggattagctgtaacttcttgcctgcagaagtgcttctgatggctgtgaaatatgcctttcctgtggactataaataaaaatgagcttcacacttcattaatgaatccttcctctcaatgtcccaagtggtccaaatgctaaagatacagtatttcacagcaggttgtgtaatcatttatgtaatatgccctttaagtaattgggttatggtcttgtgactaatgtaccctgatattcacgttgagaaaatggggagggtgttaaatactttaagaaaatgaagagctgtaagaattttgtgattcatgcaaataagattgactaatttgttctacaaatggaatgcctatgatttaattttgactgacaagtggttccaaactattaagaacataagtaatatataacagttgaactgtagtcctatgaaacatgtctgaaaattatttttattcatggttttaccttttggtaaattcctttggtgatctttagatggttttctccaagtgtcatcagatgcatctccaatttaaagaaataatctctgtatcataatacctacactcttgtataaagagagctcaaaacaaattggcaaaggaagagtcacctaaggacactaggctgaccttcccctgggatcaattattgattactgtggagataaactgaaatgagattagctagtctgctgattctcatggaatttgcaatccaggttgagtgtctttcaaagcagaatgaagttgttaatcaggttggtagaatatttcctttgccatagatactctcaatcatgcttatatttggattttagggaaaaccatatctagtatttctttctcactttgctaccttcaccttctctgccctgtcttgccacttttgcctgttaaccaccaccaccatcatcctgtatgtcatagtttggatttctgtattgtgccaagtgctttacctgcattgctatatacccttagaccagctcctgcaaggtgattgaaatgaggaaaatgagtttcaaagaggttaatgaacttgctcaagtttactcactaagtgataaaactcacatgggaactaggcctgaatgacttaaaacatatgctctggccccttcccactctgtctgtcttgctgtcttccctgtctctgtagtttctctactctttgttcacttttccctaaggtggcaggaagtgaaggacagatagcagtttccctattttcaacactaaaaataaacatgaaaattcaacaattggcaagtgagaaatcgtaagtaactttaaaggggactaggaacatctaatattaacttctttttttaatctacagaattaaaggctttggaatgcaaaagagaaacctacaaaacctcagaatatagactataatctacattcagtagttccaagagaagaaaagtgtaacatctagctttctaacaagctctcaaggcacataatatctcttctttagatttgtattctgtaaagtacaagtccctaggccttttatcatacggaagagatttttctctgagattctctgtaaatacacaggttcaacttttgatacatctctgtgtatttcttaaaatcccagtagaaagccgtaaactcaggggctcaagaactctgtgaggacgataatgataatgaaaggcagatgttgcagcgtgactgaacagcatcccgatcgcctcctatgtgaactgtagaaaacgttgttgatgatccccttaatttgacatggcttttcacaaccatccataattgggttttggggtgttttttcttttatgacacaaacagatctttggaagaaataagaggtccttagataagaaatggtagaaatccgaggaagatccatggaagagataagttgctttttgctagtgggagatttgctggaggtggttggtctgtatggtcaagaaccacaagaacccttaggtggttgagtttattgaagtgtgtcatgtgattttctctatggaggtcaaggctggagaaggatctggaatagcataacctgtgaggactaaaaacataccctctaggccaggtggagagacttttggagtatagagtctccagtgctgtcctaaggaggcctgacctcctacagagtccttgtgtaccaaggagccaggcagccacacacttagcgatgccagcatatgttgttccccaaggaaggaaagtgcttcatttctgctaaaacccaatgtgtatagctaaaacctgttgttctgctaaaacctgatgggtacaaactgcaaaaaacaaaaaaacaacaaccttcttaagacagcatttcatagactcaccatgatagcaatcttgtttttgaggcagggcttacctacttcagatacaggtgtgtactaacatctggagggtttctctaattctgggctttatgaagccaacccaagggtcagctgagaatggtgggcccacactgtgtaataagacccatacagactctactctccttgaacagaaggaggcagtagagcatagaggttgaggacagaactgggagtgggattcattttgaatcccatgccatcactttaagtggtgtgtttgggatgtgacttttacagtctttctgtttttttcagttgtcccgtctgcaaaatgggaataataacacttatggtctattatagtcgttgtcaatgaggtaggtagagtgcttagtgtagcactgggcaccaccaacactgagtgcaaaagagagccagtagggctttgatttaaatttccagtttttccccattaagactttggacagcctgatgcctttgtcttcttttctggtcaggttctggtggctcctggcttctacagagccctcctgcatgtccatgtgctcctgttccactgtcttgagaacagccactggtttcagtgaccagcctccttttgaagtccctgccattgcaatgcctctgctgtcaaataccaattcattagcaattgttttccaggaggcagaatttttctttcatatgagccctccattctatgcctgtcttctttcctgtttcattgaggcaagggaaatagaattttatttatttataaaataaattgtattgtatatattcaaggtataaaacatgttaagggatacatgtggatagtaaaaaggttactatagtgaagcaaattaatgtatccattatctcacatagttaccctttgtttttgtggtgagagcactcatttagcatgaatctcatatagagtacaattttattacctatgaccttcatgttgtacattagatctctagacttcttcattctacatacctgctattttgtatcctctgacatacatttcttcattcccccaccctgaccccataaccactgttttgttctctatctctgattttttagattccacatgtgaggtcatgtgatttttttcccccgtgtctgccttatttcacttagccctctagtcccatccatgtcgtggcaagtagaatcttgttctttttaagactgaacaatattccattgtatatttgtaccacggtttcttaagccatctgtccattagctgacacttaggttgtttccctgtcttggctgttgggaataatgctgcaatgaacatgggagtgcagatgtctttacaaagtggtgattttatttcccttgggtatatgcccagaagagggattgttaggtcatatggtagctctatttttgatttctttagaaacctccatattcttttccataatggctataccagtctgcattcccatcaatagtgtatgagttccctttttccatacctttgcccacattggttgtcttctgactttttgataataaccattctaatgggtgtgaagtggtatatcatggtggttttgattttcatttctcttatgactaatggtattgagtatcttttcatctatctattggccatttttatgtcttctttggagaatgtctattgaggtctttttaaaattgagttatttgttttctactattaatatatgaattctttatacattttagatattaactccttatcagatatatagtttgcagtattttttttcccaatctataggctgtcatttcattttgttgattgttttctttgctgtacagaagctttttagtttgatgtagtctcatttatttttgtttttgtggcctgaccttttcatgtgatatccaaaaagtcatcaaggccaatgtccatgagctgttgctccttctcttctagaagttttatagtttctggtcttatgtttaggtcttttatttagagttgatttttgtgtgtggtgtaagataaaggtctgatttcattcttttccatgtggaaatccagttttccctgcaccatttgttgaagactcacctttctccattgttttcccttggtgcccttgacaaaaattactatgctgtgtttgcattgtcatttgtcctaagttatttttaagttttccttttgctttcttctttgacccattggttgtttaggagcatgttatttaatttccacatattagtgaattttccaagattcttcctgttactgatttctagtttcataccactgtggcctgaaacaatactgtatatgagtacagtattcttaaatttgttaagattgtttcgtggcctaacatatggtctatcctggagaatgttctatgtgtgttgaagaaaaatgtgcatgtattatactgctgttggacagaaatttttgtctatgtctcctaggcccatttggtcaaaagtgctattcaagtccagtatttccttattattttttttttttgcttcatctatctattgttgaaagtggggtattgaagtcccctatgatcattgtattgctatctatttccccgtgtccattatttgctttatgtatttaggtgctctggtgtggggtgcatatatatttacaatagccatgtcctcttgatgaattgatcccttaaacttctttagtggaaaagttgctttctaattggtggattggattgggcagaagtagagatacctgaatcgactctgttgcacccatttaagagatattccttgtagaatatttcatgcctagtatggggaaggtcaaggcttctcaaactttatcatgtctacaaatcactggaggcatcttgttaaaatacagaatctgattcagtgggtctaaggtgggacctgagactctgtatcttcaacaagtttccagatgatgctggttcaatggcaaggggatgggccacattaatgtgttgaagagttgagttcgaagatgggcaatagtagataggttatcttttcaaacaacaaagcttaccgtgctcttctatactaatttttatttatttaactcattttaaagctgcatttgaggcatcaataattttacaaagctctaatattctttctctgggtaaacaacataaaaacatggtaaagtcttgacatataagtgtaaaaggattcaggcattatagatgaaaggagaaaacagcaaaattgggttgcattagttacattggttaattctgaaaagcttctaaaaagaggtgttttgaacccagcttgaaagatatggcaaatgtggattagaggatattagaaatatactaagttagtatacttgtacagggcagaaggtggaattaagccttagggacagctgaagcaaggtgagtggggggataggagggaatttgcccaaagcagagaccaagagaaaactgcagcttattagtagttagcagagaagtacccagccaagcttgcagagagcattacgaaagggtttaacaatatgtattaggaaacaaggtcctttaaggtaaacttgagcttcccactctctatcagtggggcctgtcagaggaccctcatccacagcagtaggaagcatttttactttctgtactttggccggaacatgtttactttcagctttgcttggtttggtggtggggttcagacttcttgggaaacattgattagctctctgaggctttctgtggctgcccaactttcattcattggaccattcttttgtaaattcaatattgttgaatctagtgcctctatgtctactgaacctcatgctaaaggtgtgataattgcatatttgcagttaaatagcaatagcaataatagcacacacaaatataccatctaacttacggagagatgctttcctaatgcctaccaaagagcttcctacgctgtgagtagacagtggttttaggtgattagtttctgttccccttttatttccctaagcaaccccctttttaagttggagatcctttctttgagttgaagaggtgacaggggtcatcttttaggtcatggaagatcctctcaagaggtatgggactgcagaggtgaggtggtgtacagagttactgtaagatgaatgactaccaaattttaatgagatttttgagtaagtggaggtaaacagagggatgtttgtgaaggggaggggattagtagccttagctgtgtcctactagagctgatactcatcttttgtgaaatatctggataactgaactaaaatattctgttttgatcttgcagattaaaacaggaatttcaagaccatatgtcctggttctcatattcttcagaattctcagttgggaaaaaacacttacatgtccaaaacttggaatttgttgtctctgagttttcctgggtttgtccctgggtttcccttgtttccctgttcctctatctcctggagccatgagacccccacactgttttttctgaggctcacttttgccgtggagagcagttgtgagtctcttcaagccatagctctgggaaccacagttttcagaaattgccatgcaagggaccatagaatgccacaagtatctcctacactctcttcagcgacagagtgcccctgatgtaggctgtatttccttagggtctgcatgccttttctgaatgattctgaaggggaaaatataacagagaggctggctaccctatgagacctatctatattacacttaaaaaacaaagcagagtagattaaaaaatagatcagtaactttttaaacttcaaatctgacttactaaatacacagagtatttgtctcctggacatgctgtctcaatactggctgtggctcatcttagtatcctctcagggccccagagaggcccagagcatcctctaccaccagattgctcccattttgccatagcccactttgcaccagagaccaaaaaaagtgtttctcaaggtgaatttatcttacagatactgcttttttaaaagtagggttgccagataaaatgatgccaattaaacttgaatttcagataaacagtgaataatcttttattgtaagtatgttgcatgcaatatagaaaacaaaagacaaacttatttgcgtttttgttctgttttgctaaatccagtaatcctcagagcagggtttgttccgttttcttgttaattcactgactaaatatcctgggcatcattttcagcattattatgccactctgcttcaaagtgttgaatggcccatatttattttcaaaaataaatgaattatatctaattttgctttgagaaattaataatgccatttgacacaattagctacccctagtgtattacaaaatcagagacaggtattacagatgttcagtaatatgaaaagttgatgttatggaattgggttgctaagcttgacaaaattgttaatttggatttaacagcgaagcatgaatctttaattgtagaaagacattaaatactttagtatactgtgctttttcacaagacatatagaagttccttgaaacaattattatacaattatgctatcacttgcttcctacataataaagagaatgtggttcataactctgaggaacttgaaaaacttatttgcgaatgacattatgactatgtaagtacataaaagggaaatgtttctgatcgtgattagtttgggcttaccatgtttgcaagaagagatatttaactagaatcagatttaacaattttcatcaggctgtttacagttgagaaattaattaaaatgtcatctgtttaattactatttgttatccttaattaaaatgttaattgagtacatttgtgtgtgcacaatacttaatatgttgactttttgacaaaagccatgacaatgtcttctaccttttatgttcaaatgtttgtcgacttaatgcaaatattttggggaaaagatgcatatattaaagaaacataagagcatagtttgaaagatcatttttttctgctagaactgtgtagataaccgatctgtaggaaattagcactttaaccgcagaaaggaaatctaccagagagtgcattttagtcttgtatttgcatatgagaaagaaggacagaaattaatcagctgtaaaatgtccacccagaatgacatttctaagtaaagaaattgattatggggagatgcactttaaacatgttcttgcctcactgacagtgagaacagactaaaagataatgaaaacctttatattcttttatattgatgtatacttgaccttttcatttgagcaacatttgaaatagttgtttaaaacaacatatagaactatgctgaaaaattggtttggattttcttttaacaatggtcatgatttttctttttcatgcaaacctgtggcattgacctctttttagtaaataaacatatgctgattgtgttttgaaaagcaatgatatctcatagatcagtataaaagcaaaatggttccttttcaaataatttatgaagggtagtgctttcccaaaacagcactggttagcaatagcatccagtgtgccctaccagcaacacaagtcgtgggggattgaaaagacagatgatggaatagacatagctctttgctcctactgagcttcaagtttaaagaacttattcttttctttttcttcttgataaactttatgactttaatgtctagtggaatgagatgagccagtgctgcttaagaagtaataataagcataacaaatatgtagttttatttagtgcccacactgttccaagtatatgccttttaatcctcaaaacaatcctgtatctgctatcattattcccattttgcagatgaggaaatgaggcacagacttctcaaggccacatagcaaataagcagtgaggctgggagttgaggcgaaatattctggacagaatctgtcctcttattctcctactctacttatgggtattgaaaaggttttgtgcaagagatatcaaaatatttttagcactcacacatttatacctattgcagcaaagagaagaaaaagtgcttgtgttaactcttcagttctaaacttaatggtttatagtgttttaatgaccattaaatattaaagaatgattaaaagcaaacaaggggaagcataggcctgtaaaataagttttctgagaataatttttaatttttttccatatataataagcctttgcccttaatgtggataccatcagtaattttgtggagctacatggcctttgttaaaattttagctctgccacttagccaaatgatcatgggcaaattttttaacctctgtaagctttagtatcttcttttacaaaatgcagataatgatttctccctcacagggtcgtcatgaagattaaaggtaaagcacatagcctgcaatgatgggcttatgcttatactagacacccctaaatgtgagctacagctgctacaaattaaataagcaagttattttgagaggtatcacactggatattagttaatacttattaggatatctctgaagagatttagtaacaacagaggtagatgtgtagtttaactggcttaagacaataggctatcacaatttcaatggtttgcccattattggaagtgactatttattaaggataaaatgaatcctctccatctgttacactactaggaaatatccaccaagagctcattcgtttgctgttttccttcccttccaacaggcttacctattagaactgtaggaaaaaggcaaaattaaaggggaagatgcaaaacagagcaaagagagcttggcttcaggaagccatgcttaatcttaaagaccagcttgaaagggagaaggggaatgacttggactgtccctttcacttcacccctctagggttttccactgtggaaggatgattattggttggttctctccttggagtggtggaaagatgcatggggcatctccttactctcaacagtggctttcaaatggttatttattttttttaaatcatgacttacactaataaatatatttttctctgctgtctgttctactaaacatcataaatgcagggatttttatctgttgtcgctaatgtatccaagtgtctagagaagtacttggcacatggtaaatgctcaataaatagttgttgaatcaatctgtctcgctgtccatccgtccatctgtccgtccatccatcccatccatccatccaatccatccatccatctatccatgcatctatcaagcctattaatcatctatcatatatctatcaatttatctggaaaaatatttcatcaaacattcttatgcttactatttgcttacagtgcattctcaaatattcataaaaagaaaaaaatttctgaattaatttgagtacatttattgagggagagaaccttaataggtcattctttgcaatactcagggttatgatctgcaatttgaaaagcactacttgtcactgggagaaattggctttgtgtgtaaactggcttgtgtcgttgggacttctctttcttgctgtcacagtgcctcatttagcttgtgtatttccccagtccatgcactagcttgtgcactcatattaccataaccaactgcatgctagtaaaataagtcaattagtataagctgggtatggtggcttacgcttgtaatcccaggactttgggaggctgaggtgagaggatcacttgaagccaggagtttgagaccaggctggatgacaaagtgagaccccatctctacaaaatttttaaaaaaatattaggtgtgcatggtggtgcatacctataacttgggaggctgaggcaggaggattgcttgagcctgggaagtccaggttgtagtgagctatgatcacaccactgtactccaggctgagtgacagaccaagacccggtctcttaaaaaaaaacaaaaacaaaaacagacaagtcaactagtattaagagttcttgaccagcttctgggaagctctgaaagcatttgctgcactccagtgggtcctatttttgtgaagccccaggctaatggttaattattgggtattgccatagtctagtcttggtctgtgcctgagctggtttggatgtagatctccataaaggcagaggattgcaaacagtaacctgttataaagttctctccacaatgagcatatttcttctccatacagatgctgaaattaaattattaatggattttaacacttttacattctttttatttttatttttgaggtatctgtacctaaattttatgctcactgtagctatgaagaaggaaggagatgaggtagagaaattgatgcaattaagtgttttgataggtgtgacaactgtgaaagtctttcatttcctgagaaaatatgtgagagtaaaaaggataatgtattcaaatgttaggttcattgtgaagtaggactggggatcctgtttctgtacattttctaatcctcaacaattttttggattatctgactagataaagcaatattctggcttaagtcttgagtaaaattaaggtaaactatctagaagaattaattgaacatgaattctagcatctactcaggtctgagtgccatagcttcgccagggtatctagaatgtcatgagccaagatctggacctggaaacccctcagttgtgtgggtgggatgggcactagggaggggttaggtttaaagaaagagaccagcaggctaaggatgagagccgcagggttggtgagaaggcagctggtagtggcctaatatggccattggcaccatataggtgcagcaaggtctaatgagcaagggttgacagattgtggaagctcagtgatggtcacctccaaagaaggtaatatttggaattccaagggccagacaaaataacattgagttaacattgctgtcagcatgcagacagtcacaaattctgagttgggactggtaagaataattcagggtcctaatcctagaggatcatacagcatgagaccaatgatgaaagtgtagggaaaaaaacacaacttacattatcaacatggagtgataaatggagactttgtctgcagctcaaggcacatgcctggctttcaaaagtgagtcacaaggatgggtttaatgacaaacagcaggagtaacttgacactgactaccagaatatgaggatcgtattcctccttgccaaatcaagatcagttcttgagagacaaaattggaggtgaccctaaagctgggtggcgttcaagggccccaggtgttcagaaaaggaaatggagagatggaaatcagtcagggccctggaagtgggcccctcatactccacccaagggcatttgaagtacaggtaacagcaccagaatgagaagggcagagcacttgaagttagacagaataagtcagaatcactgaggctgatagtaacctggggtgtgaaatatcttttaaatagttacattgtagtgtagaaatattatatttgcctttcaagaccattgataggggacaattgagaaaatagaacagtgtttctcaactggaagagatttgctgtctcagggacatttggcaatgtctggagacattttttggttgtcacaagtgtgggattggggacagggtttgctactgtctaatgaatagagaccagggatgccactaaacctcttaaaatgcacaggatggcccttcacatcaaagaattaaccagtctaagatgtcaatagtgctgagattgagaaaagctgaaatagattaagattaccactccatagtcttgattgaatattgaatttatatgagcaatgcaatatatttctgggtgcacataaattagttttgactttgttgttggcaaaacatgacttgactagagagtaaatagcctaggcatatgctgccctggagatgcagagcaacccagccagcaagcatagtggggctgccctggaaaacattgatccatgggcctgtgagggaacctgtgcttctagcatgagtggcacattgtcgccagttgtgacctagcttccatgggattctgtgtaatgtttactatgtttactagggatcacatggcctttccagctactctttttcactctgtataacttccgatagaaagagcttaaagttaaggacttgtgtatttctttttttccatgaatttctgcctactgcccagtcttggtctactctaacacaggctttccatgagctacagagatttagtgcagataaaggaaaacaatcgtaatgatgtacttgcagtggagggtgctgatgagagattgatgattatcttgaggaggtttgatgactttaaaaaaagcaactgattccaaagctgaaacttaaagtctttgctctggggtaagtgaatattgcttgaagaatatatgccagttactttttaaataatagatctacttagacttgattatgaggcagtttgctcactgctcttttctttctgagatttttgctttcatggctccatttttcaagatggtaccacactaatgtgactactatgaggtactgtgactgtcatagtttgcctcaaggttggatgtgctcaggttacattttgttatctcttttctgtggtaagaagaacatgaggccctcaataggtatgtgaggtgttccagatactgtcacacttaatgtacaaagtgcagtgtcttggttcatgggagaagtttctggataacttacagtcatgaaactatgagaacacattgttctttccactgtccacccaatctaagctgatgggctggaagtcagcacgacaaagtagttagaatttgtgggctcagaggtcagacacacttaagttggagttccacctctgccacttattattatagaagaccttgggcatgtcgcatatatctgtctgcttatggtttcttatctgtgaaatgaggaatattgttgtgaggattaaataatatatgtggctcatttgacagagtgccagtgttagtaaggacagaaaaaatgtttttgttattatcactgttgttgttaattgcattggactctgttttctttgttctgattttcgtcttgtttaagatagagagggtgagctgaaagttggatttcaggtaggttgtgcttttgggtactcttcagtgcttttcgtcactaaagagagttgttttatctcttttctttgggtttttccttaagttgccttggcatatgtgtgtatgtgtgtgttacaatttttaaaatttatagtgatgcaggtcaaattccaggagacaaatgctttattaacccaaatactagttataatgaaatggaaatgttgtgatcccattaaacctcaagtcattcagatcctggccctgggatcactcagatgacaggaaccctcagcttgtttacccaaatgagaagccatgaagaaaatctgcctgcctaggctgcatattctccaagtgaagggctggagcagtatttcttgtatgaggatcatttggagtgcttatgaaaatacaggtttctggaccctgtgtggggaatggaaaggttctgcagattctaactgatttgattatctaagagatgatgtgtatagggaatattcgagcctctgggtatactggcccaattatatgaaattaacaaaaaaaaattttaaaagaatgcaatgggtggggaggaggattcgattacatgattttcttgtttggaagaggtagattgaagcaagggctttgcagctctgcactgaaccgttaagggctgtggaacctctcttgtgctatctgttttcaacattctttgtgaagagggaattgcaggtgctgcttgtatacttttgattgggattggagaaccagtttagagaagagagagggagaaagtaaatatctgatttgtggcaaacaggctgctgtaatcttgacaagttgttaaaaaattagaatctcatttttaaaaggaaaggagcttaagcaattagtacaaactctaaattgaaactttcctatgggtttagagtcaggtaaaaaatattttaatttctttactttttcacaaaggacagtaaatgaagaagattgcctctaggcaaaactgttatttaactttttacccagaaatattattgcattttgaatcaaacaagaaattcacctagtattcaggattcatagttctgtttttatttttttttaatagcaaagcaaattaaattttggaaagggacccagacaaacccaaagatggcaaaacaatggaagaattttaaattttaagtagaaaaacaacagctcattatcatagccaagtaacctacgtaagtttaaagaaggagaaaatttaataggttaagaatgaacactcttcattttatgtttgatttacttgataaaatctattcacatacaggaggagccaactgcaattaccaaatataagtagcagtttattagtttctattatatgctatgtgttgtgttagatcttgggattacagaattggatatgacatagttcctgtctgtaatggcccataatgtagtgaggtggtgagaacatgagcagatagtgcctatacaacttagaggtatccacattactaggcatttattgctccagtttgcaaagtgcctactctctggcattgtgctaatgacctgactatatggaatgtgtgtgtgtgtgtgtgtatgtgtatgtttatgcatgtgtatgtgtataaactccaactcctagaacagtcctgcttttatcttcattttatagatgagataatcaaggcttacatagattaagtcatccaagatcacatagctggtttttaacagaattcagatttgaacttggaggtctgaatgaccgtaaaacctatgccctttgcaggacaatgtgacttttatcctgtgatttaattcttatatacattctttcaagctaatatgcaattattcttttttttcagaaatatatgtaaatatccttagattgaaagtcttttagaaattgcctatatctgatggggaattttctcaggagtggaatatttaaaaagagagcttgagctcttagcaatctggagcccttctgcttggtacacattcctctcagaaaaagaagtgtaagtgtccaaaacatcctcaaatgctgacacatcctccttgttaagtgaacaataaatttactctttgtagagacgtctattgcctgtgtacatacatgtttatagaaatagtgagttgagtctcaaagtacagcacagatgctgacatgtttttccagtgctgggtaagtttgtagctgagcttcggtaccaggatttgaaagatctgaataaaaaaatatatcccttcagtggaaagagagaagtctctgatctgtcacaacctactaaatttatgttttaaatatcttcacattttatgttataaaagttctgctggcttgtgctttataacacacagttgaatggtactattatggatactagcttccttccaggaggtagaatgaatacaacataatccattctgccataacgtgagctattagaagtgatgcttctggctattaggggtaaatcatatctgtggaatgaattaagagttagactattcgcagtgtattggatttgcctgtttcacaactgcattcattaagttcaaatttgatgagagctgttcatattaaatttgataaccccaattctagcaagttacacatattataaagctcctttgaaaattctgtgacattcatgttatttttgtcctttaataactaagccatttttaaattaggtgcccatatgtagccatgtgttagtgaaagtgcttcataattgatgacttttattgaattagttcagaattcagtgctcttgtctgattttatcttaatgctttggtattgaagaatctaagattactgaataatttcagtctttcaattgaatttgatgaacttctgtgggactcctacaatatccagagcattgtgcaagatgtagttggtttgaagaggaaaaataattctcaatttttagaaattactatctaatgaaataataatagttaagatctatttgccagaaatcaacaacctccttggagcaaaccaaatggagaaaatgacctatcttatcatatttaaatttttcttaggaataagaaaaacgattgtaggcgaatgtaaatataatctctctgcccaattgcatgtaacagtttcatgcccggtttatgaaaaaaattactcattaattctttttttttttttttttttttttttttttttgagacggagtctcgctctgtcgcccaggctggagtgcagtggcgcgatctcattaattcttaagctgtcaactctgactttctaactagcctcttctcacctattcccatccttaactacagaacaatgttaaatctggagggaaggtggggaaagatcagttggaattagtaaaatgtctttattataaatattttaaattgtagttctattattttcaaatatctataatagctcaaacaccacctaaaattttgaacatttttggttagatttctgtacacctgctttagtgaatagtgaaaaaaagatttataattagttttacacaaagctcagatttatttatatggaaatgggcattcttagatttcacaaaatagtttcttttgaatgggttaaatattttttttcctgaaaatgttttcatcatatgaatttactgagtaaacttcctttttgaatggatgatagaaacataaaccctgactcagcccaaatcttctctaattccaaattagtaaagtctaaatcattgatctaaaaaaaagacaggtagtcatatttttatgattagaattatttaacacatcattttttagcaatgatgtgttaaacataaaaatctttttgcctattatattttcatcatgttaaatttctgttattcatgtgtttaatacatttttaaaaattgtttatgaagtttgcagaaatgttagctgttttaaaggtctttgtgaaagttgcagacttatgttcagagctcaggaggaagctaggtgaaattttgatagacttttcacttagctaaaatgttttttatgtccagaagatgtatgtcttgcctacattttatgttaagatcttaactttttttgtatataagaaaatgcctatcagttaacagaccaggaaatatgtgagcactgctctgatatttataatgttttaaaatattatggtagcaagatgaacaatgttgcattttaattttaattttttctctttaaaatttgttttgcctttcctacaattcaaattctattaatattttgaccatctttacaattgatatcaaaatgttttagttcatgcttcaaataatcccatttggttctcacactttctttgttgaatcattgcagattttaaggtaaatcaggcccattggaattcatgtaacagtgatttaacaagtcaaggtgatatttcatggaggtgagatctgtaacaagatgtgactgtttaaattgatctttgaagtgttgaacaactttactgcagcatagtagatattttctcaccttttctttagtaatttttgccattttttcttaacgaaggaaactttctgagcacaaatgtacttagcaacaagttcttgatttgcccggaagttaaatcttaatagagtgcctgatagagtatatgataataacatgaaattataatcatagcagctaatgcctagtcagtacttttatgtactaggctctgtatcaaatgctttacatgtattatttagtctcatagttaggcctactttttggaaagaggaagctaagggataaacctatgaggatgaatggagataataccgaactcacagagataaaatgcggtggaagtagtgtacacacccagaatttgcctggatgccaaagttcatgtgcttaatgagtgcatctgtctcaataaatatacttttcttggcagctagaactgccaagaaatacacttttcctttagtcagctagaacttttaggaagataacactttttgactactttgtcattcagtagcatacacattatagagaattaagaaagaaaaaaacccaagaagggtgaaaaaatgccagtttatcttgtttgtatttattaatttttttttttttttttttttttggagagggagtcttgctctgtcgcccaggctggagtgcagtggcgcgatctcggctcactgcaagctccgcctcccgggttcgtgccattctcctgcctcagcctcccgagtagctgagattacaggcgcctgccaccatgcctgactaattttttgtatgtttagtagagacggggtttcactgcgttagccaggatggtctcgatctcctcgtgattcgcctgcctcggcatcccaaagtgctgggattttgtttgcttttttagagacagggttgtggttttttttgagacagactctcactgtgttgcccaggctggtgtgcaatggcgtgacctcagctcactgcaacctctgcctcccaggttcaagcgattctcctgcctcagcctcctgagtagctgggattacaggcacccgccaccatgcccggctaatttttgtatttttagtagagatggggtttcaccatgttggtcagactggtctcaaactcctgacctcatgatctgcccaccttggccttccaaagtgctgggattacaggcgtgagccaccgcgcttggcccgagacagggtcttatgctgcccaggctggtctgcagtgcctctgaacaggcacaattatagtttgcactactggctttgaacttttggatacaagcaatccttctgcttcctgagtagctgggactataggcatgtgccactgtgcccagcttgttatctgctttttaaaacgttggtagagatttatgggactaattaaattcttgaaacatcccagctattactctaccaagggctttacttggggaatgtgggtctggggactgatcatgctatgtgccctgcttttgccagtgaacatctaggactcctcttgtccgttcatccactctagccacagaagcatgtcctagagtgcccagaccctttcatttcttggcataattacatcagctcttcccctgcttggaaacctcttcctcaggtacttgcgaggccaggaaggcaaggctccctcctgtccttcaaatctcagcttaaatgccatgttctcagaaagtgcctatctgacccttcaaataaagtgagattcctcctcactttcatctctcccacacactatttccagtgtaccgctttcattagctcctgtcaatttgttgtctgtatcacctactagatcctaagcttcttgaactatgtctgttttattgtgtctctagcactgagcagaatggcatgtgacagatactcagtaaatatttgagaaatgaatgaatgaaagaccggatgacttggaaagcttggaaaaggagaagaaataattaaaaggaacaaaatgcaataaaagtaactttctcattatagcctaagcaaaggaattgggatgagtagcagcaagcgagaggggaaagcattttctgttagcgtgtgaatctcaaatttgtccgacaactttgaaagtgaacaagggtgtcccaacttcatcttctgagaaacagctgtgtccctgttaactttattttttctaacaaagcaagaccctgattccaaatccaggcctcagatttgctgtatcccagagaaggctgattgtagcttgccatagataatgaagactggtctgtggtgcataatggattatagtttgtccctatttattatttttttccttaagactgccgaattcaaaataaatgacatgttttaaatggctactctttattttgaaaaatgttattagagttataaattaagttcatgctgttcagattactcttgcatttaagagttcagagctgtataggtttagggaagaaaacataattaagcataaataacagattccaggaaacaaaggataaaagaggaaatgttaaattataagagtaatatagcaagaaataatagacatgcagcaagtctcccaccacaaaattatggtagatgggttcagtcaattctgtctttaaagcctggttgaaaaaaaacacagaaatgaaaattatggaaaattgatttcctaaaaatatgtaagtcatattatcattttaataaaataagaaaattaggaacttgggactgtgagataccttaaaccagtgtccccacaggcagagaagaattgagaaggtggtacaaggaagccctcgttatctgacagtccctggccctggaatatggcacttacatgtgattctacttagaatgggaataaacttttccagataaatagtttaaaaaattgattgaggctttatatcaaaaatcaaaacaaaattatgaaaccactttcctctgaaaactttgttgtctgtcccttggtctaatcatcccaaaggtcatatgtccatgattttgcacatgattctggcaagttttcaatgctgcttccagtgactttctataactctggatcttttataagatctccaatttcattttgtagttgttttgcattttacttttggctattgtaagcaatcaacaagaagttgattaaaaaattttgcctggaacaaaagtgaaggttgggagggagcctgtttcagaggtcagtggcttagtgaatattttcatttatgacaacttgcttctccatgcaactcctgcactaaggtttcttgggcaacacatgctcagacaattaagaactcttgtaattctgctcccaaacaaaaacctttttgtattagtctgttatcacactgctacaaaattattacctgagactgggtaatctataaagaaaggtttaattgactcacagttctgcatggctgtaaaggcctcaggaaacttacaatcatggcagaaggtgaagggaaagcaaggagtgtcttacatggcagcaggagaaagccatcagatctcatgagaactctctcactatcataaaaacagcatgtgggaaactgcccccatgatcccatcaccttccaccaggtccctccctcactcttggggattataatgccagatgaaatttgggtgggcacacagagctaaaccatataattccacccctggctcctcccaaatctcatgcctttttcacatttcaaaaccaatcatcccagaaatttcttctgccagatacactaaatcatgtttctcaagttcaaagttccacatatctctagggcgggggcaaaatgccgccagtctcttttcaaaagcataacatgagtgacctgtactccagttctcaataagttccttatttccatctgagaccacctcagcctggacttcattgtccatatcactatcagcatttttgtcaaaaccattaaacaaatctataggaagttctaaacattcttctgtctcctgagccctccaaactgttccaacctctgcctgttacccagatccaaagtcacttccacattttcaggttatttttatagcagtaccccactccctgtaccaattatccgtattagtctgttctcatgctgctataaaaatactacctgagactgggtaatttataaagaaaaggtttaattgactcacagttccacatggctgagacctcaggaaacttacagtcatgatgcttctatgattgggaggggaaggaaggcatgtcatacatggcagcaggagacagagcaggggaacctgccacttttaaaccattagatctcatgagaactctctatcatgagaacagcatgtgggaaactgaccccatgattcaatcacctcccaccaggttcctccctcacacatgggaattacaatctcagatgagatttgggtggggacatagagccaaaccatatcgttcttcctgacctgccacaaattctattactgagaaatgactcagagattgaatagcttcaaaattatcttgattggctgcaacagcggtccaaattcagaaaattattgtttgacccatgtattagttttctaggacaaactagaaagagtaaagaatctctactgtgactttggctgaagggaaaataactacattcacgattgggctgccaaggtcagtcttttggattgatttttctcattggtttagctttccatggtctgggaattaaatcccctactgtgtgtaatttacacttattgagaagggcgtatcatggcaagctgttctgtgtcatgtctagatgaggatgaaaaatgaaatttttagcagttttgcacaagtgtttgggaatttgattttggctattttgaatatttaacttacatgagtacatgtatattttcagtatataataaagtgatgattaaaattatactaacaagaagtttggttttatgtccaacagtttagtttctcaaagatgctgagtacttttgccttgatttggggaaagcagttcaaaggaaataaatatcttttcataaattaaggctattagctaatagcttcagcaaggaatggtaaataaaagtgttcagtcttgtttatacctcaactgaaaggctaataattttctggtttatacctttgattctatagatttattaaaaatgttaggatatgaatgttgactttagccgggttcctgctatgaaattcacgatgcatgaaattttgacatacttatagacattcctacatatcatttattcgtaggaagaaataattccaatttatcaggttggatatggtgaataaggagtcattatgaagtcatatgattaatattgataatgcagttgccataggaccttaattcatgtggttttgttttttgtcctgtcagttttcttccctgttgtaatcagatattagctattgttcagttgtttgctgggccttctgctgtggcagctgccatccaaaagctgactggagaagaacaaattcagaaggtagatataaaggaagcagtgaatatgacagggaacatttttttccctgcttattcctagggaaactatatagtatcacagaaagaatgtggtctttggaatctgacagattctggcttaaaccttaccgttattcattagctgtttgtaagcaaaggaccctaactttcaagtctcagttttcttacctataaagtagagataatgatatctgctttataagatagttgcaaaagttatagtatacataaaagtgcttggaaagtttacaataattagtattacaataattactaccattgaagggatctttcagataaagacagatgactttggtaagagtgagtggtaaacctggtacttggtgggcaggtttcctagtggatagctgccaggctgtatggaaacagtggtataaataaaatgactcagcttgatggtcttggcatgagacttaaccttccagtaactccactgacatcagagtagtatgatcctcaaaactagatgattatcaggatagttggagaaagtgcttggtgtcatcctcaaactgaattagaatctccatatgaggttaataaatctgatttttaaaaagccacccaggtaattctgatactcagctttggaaaccacttcttaagattcaaacccagatttttcaaaccaactttgagcatcattgggtgagtagctacacattatttttaagaccctttatcttttatatttttgagaaatgcaaatagaatggaaaatagattggaaggccatgagagtgcctgctgagatgtcacaagagatgtgagtaagagctaatggggcataggcctaaaggtgccagtggagataagatatgtcaagacgccgagatattttgaaggtaaacagaatatagtgattgcatgaacatgagtgttgaaggatatggaagtaagaaaacattataccaagatttcaaataacttaaggaggacttgtttttgaagggtgtgtgctggggtggaaggagagaccaggcattgattatttaaaaaaatctttattaaataataacttacatataataatatgcacctagtgtaaatgagtatttgatgagttttgacaaatatataaacctgtatatcacagtcacaatcaagatatagcatttttccgtcacctaaaaactttccttgtgccatttacagtcctcttaccctgctctggccccaggaaatcactgatctattttctcactgtaggttagatttgtgttttctggaatttcaataaatagaatcacattgtatgtaatcttttgggattggcttttattgctcagtataatagttttgagattcattcatattactgtgttcatcagtaatttattttgattgccaagttgtattttattttattgctacaccacagtttgtttattcagtcacctattgatggatatttaggttgttttcaattttgggctactgtgaataaaattgtagtgaacatttgagtacaagtctttgtatgaacatatgtttttatatctcttgggtaagtatacctagtagtagaattgctggattatgtggtagatgcatatatttatattttataagtgtacatacatatgtacatatgtgagtgtgtgtataccccccacacacataagggatatatatatctgccaaattatttcaaaagtggttgtagcaatttgcattctcaactgcaatgtaggagagtttaagttgcttcacatcattgccctacttggtattgtcagtttctacctttaggaattctagtaagtatgtagttatatctcattgattttaattttaatttccctgaagagtaatatgatttagcatctttttatttatccatttgtatatcttctcttctgaatttctgttcaagttttttacccattttaaaatttggactgtttgtattgttatgagttgtaagagttctttaaaaattcttggtaaaagtctttaatcagatatagcccccaagtattttctcctcaatctgtgatttgacttatattttattaataatgatatgtgaagaggtttcttattttggtgaattccaatttgttaatttactttatgaactgtgctttttgtgtcttttctaaacatctttacctcaattttgtgaaaattttcacttaagtttttctaatagttttattagtagtattatttaaatacatttaaggagtacaagtgcaattttgttacatggacatattatatagtggtgaagtcttggcttttagtgtatccatcacctgaataatgttcattgtacccattaactaatttttcatcacccaccccatttctcttcccaacccttctgagggtactagacctaccattctatactctgtgtgtacacattatttaactcccacttataagtgggagcgtcggatacttgactttctgtttctgagtaatttcacttaagacaatggcctgcagctccattcatgttgctgcaaaagacatgcttcattatttttacggctgaatggtattctgttgtccatatataccccatttcttttatccagtcatccactgatggacacttaagttgaatccatatctttagcaaagattatgaatagtgctatgataaacatatgagtacaggtatctttttgatatagttatttcttttcctttgggtagatacccggtagtgggattgttggatcaaatgatagttctacttttaattctttgagaaatctctttactgttttccatagagattgtaaaaatttacatttctaccaacagtataaagcattcccttttctccgcatcctcaccaacatctgttgttttttgactttttaatagtaatggttctgactagtgtaagatgatatcttattgaggttttaatgtgcatttctctgatgattagtgatgtaaagtattttttcaaatgtctgttggccctttgtatatcttcttttgaaaaccgtcttttgctcactttttaatagttatttgtgtgtgtgtgtgtgtgtgtgtgtgtgtgtgtgtttagttgtttgagttccttataaattctggatattggtcccctgatggatgcatagttttccaatattttctctaattatgcaggttatctgttcactctgttatttcttttgctgtgttaaggttttttagtttaattaagtactcatttatctagttttgttttggtttcttgtgcttctgaggtcttagtcatgaattcattgtctagaagagttttgtcctgaagagatttccctagattttcttctagtatttttgtatccttgcgtgtactgctgtatagttttattatttgtgtttgggtcagttgtccactttgactaatttttatgcatggtatgagaatcaagtgtcttttttcttcatatggttattcagttctagcaccatttgttgagaagttatcctttcccctttgaattttcttggcatctttatagccatttctaaactcttcacttttttccattaatctctatatctagctttatgccaatctttgctttgttgattactgtagttttatagtttgtttagaaaacatttaatgaattcttcaaatttgctcttattctttaaaattattgtagctattgtaaattctttgcatttccatacaaattttagaatcagcttgctaatttccagtgaaatggacagtcttgtgtcttgcagactcttaggggaaaagcattgagcctttcaccactaggtatgattttagatgtattttttcaacagatgtccattatcacgttgagggtatttctgtatagtcttaataagctgagactttacttatttgtttatttatctattttgtgaatggatgttaaattttttcaaatgctttttctacaccaattatggttttgtatttataccgttaatatggtgaattgattacattccttgtcattgtttatttaattttttatatactcctaaggttgatttcccaatattttgttaaagggtaggggctacatctggttccagttatttcgttttggccagaagcgcaagtctgtgcaatcagttctgatcatgttgaatttaaggtaaatttaaaatttctaaatggaggttcattatccaattggtagtaggtttgcattttagagaagtctgagttgactatttcagagataaatttgggcattgtagttatactgacagtgatcaaagtcataaacttgttggacattgtcatcttgtgagaatgaaagggtgcaaaaatattggggctcaggtcaggcctcagggaacctcacttttaaattgtaagcaaataaagatgaactagaggagatgacaaagaaggaatatctagaggggtaggagaaaaccaagagagcgtgttgtagaagccaaggaaaatattgtccagattttaaagttgctgattcaagtgaaatgaggacagcaaattgagcattggattttgtgacatgaaaagttttatgatcttgcttagagcagtttgaatacagccctgggacaaaagccggtctcaatgctgaaaagtgagtgggaggtaagacaatggagagggtacttagttgaaattttaaagtttggttgtaaaaggtagacaaatattagcttgagagctggagttggatgaggagttgagtaatggtttattttcttttttgaaaatgttttctttttgaattggagaggcttgagtatacacaaatgccagtagaaaggacccagttgaaagtatgtggttaatgacttgaaagagagaggcaataatctacagtgtcaagctcaaaaaggctgctgcatgtgcaattcagagcagagttgaggcttcactttagatagcaaaggtgacattttttcttgtaacgaaaggaaagggaaagggaaaggaagaaggaagggaaggtttgtcatgtgatgatgtgaaattaagaggtatctttaactgatggcttctatttcttatggggaagaaaaagatacattctacaaaatatttgaaaaatatttgacccatattgaaacagatctgaggaatttttgaagaaaatttggtaatgttttattagaaaccatgggcagaataataaagttgtcttagttcattttgtatggctataaaggaatacctgaggctaagaataatttatgaagaaaaaaggtttatttggctcagttctgatggctggaaagtttaagattgggcatctgcatctgatgagggcctgaggctgcctccactcatggctgaaggcagaaagggagctagagtgtgcagaggtcacacacagagaggaaatgtgagacagagggaaggtgccaggctcttttaaataactagctattgagggaactaacagagtgagaactcactcccccaaccttgtaagggcattagcgtattcaggaaggattccccccaggacccaaacaccgcccattatgccccacctccaacactggggatgaaatttcaacgtgaggtttggaggggacaaacattcaaaccgtagcagttgtataggcacagacatgtttgattgtgacatctggctgattactagttttgaagggactcagtagccctggcgactattatatggatgaaatgagacaccctaaaccaaggctatgccagtccagaatgatgatttacagatgattaattcaatagtagccacttagcagggatggaaggctggagggaaaacagtgacttctttgcttattccatctcctgctacaggggattaaaagtctttcttttcctctttcccatcttcttctcctgttcctgaagttcaacgttgactcaagccacactgccttctccactcatccccttacccttagtccctagtcttctctaatgctggtttctcaaccagtatatttaatctaccccctactcttctcagtccctctcccaaaaagtcttttggtgacgtgttgaattttttttatctcagtatttccattttcttttcaagtgtttttcatcctgcattttttgagctaccttgaattctacttgttgtcctactttctatttatttgtttacaaaagaaaatgtctacatttgcagtacctcaatcctaatttaagttagattatattcttaaatgtcaaactactttaaatctcctccattttttttcttagaattaaaaaaaaattaaagggcatccaaaaagcaatgtgtatgtctcatcaaatttgaggttgaaatggtatttttttaaaagacagacgtgcctaagaggttttcctgttttttctttttccatttttttttttaaatagaaagcctaatgatatttacatacagtctctagcaaagcattatggagacatttacatatttagattatttagaaatttagaattggaaagacaataaatgtcttcatatatctaagttacggtctatgcaaaaggattcagctactcataaaaaaagaaaagtatattttcatttaagcaccgaaaatgtgggaagcttttgagaagcagttttactaggtagactgttgatattaaaagccaggaatcctgagttgttttactgtcgctagtaagcagttaatcaacaatgtccatgtgttatctgctatgtacaaagtgctttcctaggatctgctgaagaatagcagtgtatcccagtgcctcagctcataagcctactctctaaggtaaagtaggtgtatgaaatgaatttgctcttcaaaactgaagtgaaatgaactttttttctttgatatcaaataattctgacactgagccacattcactagggtgtcaacaattcaatcatattcagtttggagacctagccttcagttgccaaggctactaatatggtttggctctgtgtccccacccaaatcccatgtggaattgtagtccccaggtgttgaaggtggggactggtaggaggtgagtggatcatgggggtggtttctaatggtttaggaccatccgcctagtgctgtctcgtgatagaattctcacaagatgtggtggtttaaaagtgtgtggcacttccccctttgcgtgcactctctctccctcacccctgctgtgcttgctttccctttgccttctgctatgattataagtttcctgaggcctcccagccatccttcctgtacagcctgcagaactgtgaatcaattaaacgactttttttcataaattactcagtcttagatagttctttagagcagtgtgagagtggactaatataggtacagaggagataaccacggagatgctcactgtagcccctgtgggctgttaaaaggagggggattccattccttctatggcaagcatgggaaatgagcttctttgagggttcctgggttctcaggcactaccagagaagactcattcccaagtctctggtgaagtactattctctccctctatttccatttcaaattcctcctcctcaaaccttgggagatgcccctgctctagtaattcagctctataacctctataggccaagtctcctgaaaatgagctaattcgccaagacatgcaggcttgattgctcatgtagagggcgcaaaggaaaataaatcttttcatccgtctcctaaagcagtaacaatcagacagaaatgaatatcttactaaattatcctgctgcatataaatgctatggaaaatgtatcgatgacaaggtacattgcatcttttatttggcatttcatcatgcaggctttgccaaatttttatttttcaaaaactcatctgttattttcaaataagtaagaaatatatttaaaaagcttttactgactcaactcttgatatgatatattcactggtctatagatttatcatgacactaaaaataaactccatgctagcatttgatgcaagaactgaaacataatactcttaaaaacagaaatttggatgcagaatatttttgaaaagaaatttctaatgatcaggagatgttcatcctaggataagtgaacataatgttcaaggcatcaacttcttcataaagtgaattagagggagcttttatatctcctcatgatgacaacatccagagctacaaaaataatctttgcaatgaatgtgtttaaatccctttgagcatgatatggaaaaatttcaaaaggaaacagggctcttgagtacacattcaatgtttcatactatagcagagcttttccaattttattgtgaacacgaatcacctggagatcttgttaaaattcaaagtctcattcagtaggtctggggtggggcctgaaattctacatttctaagaagctcccaggtgatgctgatgctgtgggtttgctgatagcactgagtagcaagattgtagagaaaacttagtaccacagttactgtagtcaatactgttgaatttatcttttgcaacatgaacatatcttttataccaaaacatataagcatttgttttcctctagaggaaatttggaccttaaatttaatttttaaagagtcttcatttctggtggccaactggccactgagaggtataaaaaagggagggctaaacaaggcagaccaaagccatgcatagatgatagctgcatagttggaaacttcataattggaaagtgtgtggcactcacataattctggaacccagccaattggccagctatgacttgaggacccctggtgcaccagatgatcttcagtttatgctgggattggtgtgcgtgacaagttttgggcatgtcattttgagatacctgttggacacttaagagagaggtcaaataagtaagacatgggtctggaactcactggagagatttagactgcatttataggtttggagtgggtatgaagtgaacacaaaagagtctaggccacatcctaaggaatgctaacacttaaaggatgaaacaagggaagaatagccaacaaaggagatagagatttaagaggaaaattggagagtgagttctcatttaggccaagtaagagagtgttgacatatcgtaagtgcttaacaaatacttgttgaaatgaaaaacgagaacaaacaaacagaaagcagactgaactgggctcatgaacacctttcaccaagactactgaattgttagcttttcctaagcaatctatagcctttcataggtttgtttctgtcagatgctgtcccctatgcctggaacacctttcagtcatcttctaccttttcttttcttttttctttctttcttgtgtatgtgtgtgtgtgtgcatgtgtgtgtgtgtgtgagagagagagagagagagacaggatctcgctctgtcacccaggctggagtgcaatggcacaatcttggctcactgcaaactctgtctcccgggttcaagtgattctcatacctcagcctcttgagtagctaggactacagtcacacaccaccatgcctggctaatttttgtatttttagtagagatggggtttcaccatgttggccaggttggtcttgaactcctgacctcaagcaatcccaactcggcctcccaaagtgctgggattacaggtgtgagccaccacgcctggccccatttcttggttcttgcctctgctccccatcgcctgttgtatttagatgtgctctctctgaacttgggaacttggctagccctttttgcacttaccttcccctgttgacctatgtgattgctgtccaacctgccccaaacttgtctcagaccattttgttggtacccaactgggccaggaggcccccctccccagaaggaacagtagcaattgggattgatgaaaaccaatggaggcagataatatttagctgatcttagatgctagtatctcctattcactgtgataccatatatggcaatggctggtgatgtccaagctccagccaagccatgacttacaaccataaaggagttgtagatgtgaacagaggtggaaacggggaggaagctgaacacctgtgggaaaaaaagctactgaagaattaatatcagatttaaaaatggacccaaagtagcggagagtagaggagtttaagaaatgaatccggggtcagactacctggatttgaatcttattctgtcatttacaaattacttggtcttgggcaagttacttctccagattatggtttagtcattcatgaaatgaagctagagcactaagcacagttcttggccaatataacatgttaaataaatgttggcaaaatgaacatgtacacatgtgtacgcacacacacatacgcacacattatggaatacgacacataaagaaggcttatagagagcagtaagctaggcttcccaaaaatgttcataggatgaaagggctaatcaatttgtttaggggaaacttaatgtattgccctttggatactgagatgatgccttctcagaggaacatatccttgcattctgtagtatgtagtggaataaaggactctgagtcatttacatccttttatcaacttttcctgttaccaatgatgtccatttatgaaatcagctttttggtctttgcaaatggagtgggttttccccctgtgtaaatggagctcgaatgaagacgtttaacctcatgcgtaccttcttctaatctactaagtttactaacttaggtaacagaaagtaaatgagaatttccagtgctattaggtgttcagaatcagtacctgaatgctagctgggagataaataatgacttgaagactaagattttgtgaatgcggataatcactaaaaatccatgaaattgccagccaggaaacttacttgcataaacgtccttatcaacattcttctttatttgcaggagtcaaatcatgtactattggctggcagaatgccagtctaaatcgaatatttgccagcttaaagtttattgacttcaatttgttagttataattactgactttttattttataatgttctagtgctgacatgcttgggggaaaaattgaaccacagcagtgattgcacagtaaggaaatcagcagaagaggaaaattaaatgctaggtgatagtttgaagtcagcagtgatgggaatgagtgggtgggagagttaaatttttaagtaacttagcaaatgatgctaataaagtgccatggcatcgttttggtttttctattataacacaatgtaatttattattttttgtactcatgtaagaaaatcactttatagaaaactttcactgtcttaagcagctcatttcaaaacttcccctaatttttcttttgaagaataatcagagatttcatcttgaaatcccaaactgcttgaaaacttttccaagaagatatcaaagaaactggcagaaacagaaagaatgaaatcagggaatgcagttctccatgtctccctgggatgctgcctcattgagcagagtttccaggggtggacagatgcatgtatttctctttcctcctcttgagaggtgcagaaaatatatattaccttgtaaagaaacaaaccaaagcaaagcaaagcaaagccaggttcttttagaattagttctaacctgcttctcatatagcttgaagtcctatcccaaagccttcactgcctgagtacaaagaagagagtttcctcctacttttcaatcacttattttttactttcctaaggaaggaaacaaatattagagcttataagtaatataagtatacatttattttttttctggactcttgacttaaagttgcttcttagtgtcttcagttttcattcatctgtttacctttcatctatccattcatttattcatgccttacccttacaagcctcaggactcagagatctgtgagaatgtaatgcaagtccctgctgataaattacgtagcattttcttgatagtcctggcataagaaccccagttttgcatatagtatttgaaaacattatttgtaatatgcatgggagacggtggtctatggtttaatatttttcagcctgtggcaagttttctaaaattaagtacctgtcagtagactgcctgtcctcttcatttctgcaaattgggtagtatacacatctgaaggagatctcaagtgagaggcaatctgtggctggtgttcagtgttcattcctttttcttcttcatttttcaatgtgtcaacttaatgtcacttcatcagggaagcttgccctgtcccttgcggaccaggtgagtggccctgtaactcttagcggcaggttcatagctttcacaacaaccattacaattgccgttaaatgtttatttggttgattatttattgaatgcctgctttttccatttggtcatatgttccatggggctgggaggaccatgtgttgtttacagtcctgtctccagggcctgtcaccgtgtctggcatgtagtgggagctaatttgttgaatgaattaataaaaaagtaaccattaaagaacatttaactattagaagaagtgtatgtattggtttagccttctaaatttctgtgtaattttgcatatgcactgattataattttttagaatcacagagtactgaaatatatggaaatttaaataaaactgttcaattttttaaaaaggcaaaattgaagataaggagatgctataaactagagaaactataaaattagttggaatattaaagtcctctttttaattttttgagtggcagtgtctttctctgtcacccaggctggaatacagtggtgcaattatagctcattgtcacctagaattcctgggctcaagtgatcttgcagcctcggcctgccaagtagctggggctacaggtgcaccaccatgcctggcaaattttttaatgttttatagagatggaggtctcactgtgttgcccaggatggtctcaaactcctggccttaagggatcctacagcctcagcctctcaaaaggctgtgattacagatgaaagccactgggcccagcctaaagtccctttctttgaaagtgaaggttttaaatccaacttgctagtaaaacttttagggtagttaggcttaaaaatccccacactactagtgacttgatggattagaacaattcttttcctaaggagctgttgtgctttcttattgtaaaatgtaattagcagatgtaaaaaaaaaaggtttattaatcttatggggtaaaattatggttgcttatatgtaaattatttcatgttcatagattgcttctcttttattttaagtaaacaggttagaagtcaaaatgccattaccaatttgattaaaatcattacatttctttctaaaacatgatattagttattttattttccataagaaatccagacttcattagtctaatcttaggattgggattttcagtagccaaatcaaaatgtcttagtgtagattttctgtcaaaaatatttgaaagcatcaaattatgaaagagtaatataatgtagaaaactgaaaatctgcacagctctccatacatttagttcacatgtccagtgagcaatgattaatggtgcctgggctagatagcttctgcttggcctgccacaaccactttcttttgctgtctgctggctgccgtggaaggttcctttgtgcaggcaaagtcaagttctcttgctctctggcttccaatagatttggtcagagggagacccagcaggaggtgtgtatgagggagaggtcagaatgcaatttccttttgaggttgccaggggctggctgtgtccttttagagagattactgcacccctcaaggtggcttccgttcatgactctgtaactgctctctctcttagggctcatgggtaacaactgccaacctcgacctctgactccttctaggttgtggctttccactgccttctctatatgctgctcctgccttgaaaatagtccctttatttagtctccttgagtcatttgttttctttccctctatgactcatacaatacccatgaaaaggaggtgagaaaatgtacccttttacaattcaatggtctattcaaatgaattatctgaaatcaacatatgactttgtaagtgtaatatatatttatactttcaggcagatatagatacaaaaacactatgttttgaagaaagtgtgtctcatgatttgctgctaaaattttaggttcaccattagtagcaaaccatctttgaattattcatctagcagtgagaatggattgatcttgtctctcctctctctggttgactttgttatgtgctctgtgtttgtgagaggaagattctggtgaggggtgtggtcttcatcctggcccataatggaattcaactcatgaccttaaacctactaactgtgttacactcagctgtgttaactaaccacaggccccttttgtgcaggtgtgtatgtaaagctttgcttggtcttactgagctcatgttggggagatagataaaaatatggtgcaatatagtgtactcctggctctccttgaccccatgatttccccatttcaataggcttcctctcctttgcttttgttaaactccattgtgcatcaaaacccaaaggctcacatcctgctctgaatcaactatgggaactcaactgagaagaaaaggtcagagactgaatttcctatttgacaccaacttgtacaaacaggaatcttaataactgtcgactatgaggacaggattattctgagccagtcctgatttggggaaggaatactactacttcatgtttttggatgcaaacttggggtagtcatccatcttcttttttgtttcacactctggctttacatttcctttcttcttttccctctccttagcctgttttcatgaaggtgggaggagcatgaaagctcagggcagtgtcgggagagttgggccagtgctggacattgacttctagccctaactcctcatttatatctaatttctgattatatactgatgttttgccacaagcaactagtagttttaatactagagagcagtcaagtatataaaaagacaaagttaatggctataataattatgcttttttttgacctgagttttgcagcaaaaacaaatctaccccaaggccaggtggtaggaagctatcatcctgatggccgctgttgctaaccaccatcactggaaaagtgcttggtcaagcactaccccctaagggaagaatgtggcttcaagctgatctttcactggaaaaaaccaatgatgttattgagtagcacaaagaacccaccccgccaacctacttcaccaattaagttccatgatcaatggacaaggttgtttgcagagaacaaaaaccttttttggcaggggggaaaaaaacaaaaaaaaaccctttttcatggtgaaaatatacgtgattcaggtcttaaattgtcttctgtctgcaaatctgtactcagatgtatgcaagtttcttgcagaaagattgaaatttcctagaatttggaggagcttcctctaagctgtgctttaggtggctttttgctagccttgtcaggggtgtcttggcttccttgggatatttagcaaaccagtaactgtggtgaacagatgaaaaacttatggcattctgaatagacaaggcaagtttcaagcttattgcaatgttttgatgtgcaagcagtgggaaaccttgaggcagctgaagttgttcttccttgggccacaaaaagtatttctggtatctaaaagtctctgatccccttggagcctcagagaccctttatttcatcactcagtcatgtacaggaaggctcagtgaaggcaacatggagagacacagttggtttgggggagatgtaagcacttttttccctgtctggaatatctatcttacagataaagataagaaagaaggggtaaatgattaaataatctatgatgttgacctttgattagaaatgtaatttttattctttaatgacacattgaagtccgtgggctgtcaaggtgtttgccaaggtagttatgaagttttcatggccatttttggcatttcaaaaagcaaagtggcagttgtaagcttccctacgagaagactgcacaggctacaactgaagcggcacttcggtgatttgaactggaattccatcacttcagcttggtaaaaacagatgccttgtgctgatcagaagttttgcagctgaacagatctttgattaaaagagaatattggaaatgggtggtgttttaacttaaatagttttatagaaaaatatttcaaagttaggatacatggaagaaaataacaaaaggggttcttgattaatggatggatgggctcattttactttcaatgaatatttattgaacacctactatctcatgggagctcatgttacatctgtgaacaatgcagaaaataaccctgtggaatctacatgttagtaggggaaacagaatacacaaattaatgcaggtggtgaaagaggaaggaaataagtagagtgatgaggtcataatggaaggtgaggagacaacactagatggggtggtcagggaaggtctgttgagctgaggctgaaggatgagaaaggccaggaaggacttacttgggaaaatgtttgtggtgatatgtatgagtgctgcaggtgaaacaaaaaggaagccagtgtagttggatcaggtgagtgagagggataggtggtcagttgccagttcaaaggatcctgtgacaggaggtctgggctatattctaagggcaatggggaaatgattgaaggactctaaacaagatttttctaagatctattttgtgttttttttttttgagacagagttttgctcttggtgcccaggattgcaatggtgtgatttcggctccctgcaacctctgcctctcgggttcaagtgattctcttgtctcagcctcctgagtagctgggattacaggtgcccaccactatgcctggctaagttttggtatttttagtagtgatggggcttcaccgtgttgaccaggctggtctcgaactcctgacctcaggtgatctgcccacctcagcctcccaaactgctgggattacaggcgtgagacaccgcacccagcctttaagatctgtttttgtaaaataccagttttcttgctggtgtggcatagatttgagaagagcatgaatggaagcatgaagaaaagtcaagtggctttaggaatccagatatcacagtggcttggactagggtgtggctttttgctccaccattgctaggtcatagcctaagatggctaatggagttccaggcattatgtccaaattctagccagcaagaaagagggaggatcatgaaaaaggcatgccttctccctttaaggatccttttcagaagcttcacttaccatttcaaggaaggccaggaaatgtagtcacgttctgggtggttaggtaaaaactggaggtttcatctagaaggagaacagacactagaagacaataatctctgctaactcctattaataatatatgtaaatgaatttcttttgaaatataattttaatcttgagctctaagttaaatttttggaatttctcagagtttgcaagtccaatattcacagaatagctagttaaatgtagattaagtaattagctttattaacatctgggcaagcaccaaataactccccaggcacatgactatctgctaagaactgcgttcgagataattcagcttgaacctgtgcctcctactcttgcaccatatctcaaccttgggacccacttctgcctgcacggaagacttaaagttcacttgcagtgagtagcatggacttcaagtatttctcaaatgtctggttgccagtggaatatggagagaagagggtgggcttcctttccaagaattgaggcccagcatggtctcatgacattatagagaaaagaagcctgagatgtatgtggacaggtcagagaataaagagagagcctgctatccccttttgcccaataaacgtagaactctggctttgatttctttccccctccatgttggggaaagtcagtaaaggaacggagagtgagagaggaaatgtttgttctggagctcccaaagagaatggagttgggaggtaggaatctcctcttctgtgggctgaagtgagaatatagtgagagaagaaaaagcgtttttcctaaccaaaataattgttagaaaagtggaatccaaaacaatttttttttaaaaaaagaggatgatgagtgtcctgagttgtataattaattgactcaaatacgcttcatttgagtaatagaaatatggccttatttaagcacatatgatatttttatgaagtctcagcacaaagaaaataagaaatgaaggaaagcaaaatgacaggtgttttcaaatatgcagtaggatgccttagggaaatgaagaagaaaggaaatgagaaagtcacctagggacagtggtagagaaggctggaagggcaggtggctagagaagggctaagaagttagggcagggctgagattggggagccacagcagtgttgtcttctacagagacttgtcataggggagtgttcatcaggcttctggcacacccaggggtaatgaaagggcagttcacaaaaagattatttgtaagtgtgggcacagttagaaaaaacaagggatgatgaagtgcttcggagccaacagcagtggggagaccttacaggggcaatggtacagagtggtcactggaatctggcaaaagctttagctgtgggtgaggggttaggtggagaaacagagccagtggaaaaagaaactgtgggataaatactctaacttctttctgtcgcccctcgccctcccatgttctgctagtgcctccgggacaaactcaactagaagccagaggcaaggaagcccaggcagtatggtcatagagagcagcctcctagggtctttggcaggatagggaaggatcaggagggtcgaatggagaatagcctgcacaatattttggtggaatgcaagggaggaggtggtggggaagaagctgtattaaatttcctgcagcagtttaattaattaattgccctcaaacattcattgagcacttggtctgcctggtgttggggatgccaaataaagaaacagagaccctgcttggtcttgagaggatcataagccagcagagtcatgattctaatgttagatggcggaggctttggaagacaggaatagcaaaagacagctctgcctgatggagttagtgaactgtccccagatggaggtgacttttgagctggatattgaatttgtatagaggatcattagatagaggagagcattaaatctccctggtatggagaagggtgcagatgctgtgagaatatggagagaaggtacaggtcaggggaggaagatgagacagaatctgatgatctttgtgaaccagaccgaagagtttgtattttatcctttacattggccatgggagttaacagaggcttataaaagacactacttttttttttaaaggatgggggaactgataatgggtgcttttcctagcaacttcttttcttgggatgcttttcttctttttcctttcatttttttcctccgcttctcttcaccattcaccacctttttttccattgctgtgtttctggtagatgaaacctccaaggttaagtgggtagttgcagtgaatttgatgtagggaaaataaaaggaacattccaggtctttaaaaaatttttacttcagttgccagtagggtttaatttgcgggtggtagaaatactggggatgctgggacagaaattaaaatgcttaatgaaccaatgcttaggggtctaccacaataaaataaaaatgagatgtgacttcatgaaaacttgaaaacttgtcttgaaatactattcatataccctgatgtgtattattgtagagtgaaaaaataaaaatacaaatgcatactcttgcattgctttcccacacattgatctgcaaagagaaaactcttcaagactttggggagaaagtccattactgaattaatcaaacaaccatcttctatctgcacttttattttatataccctttacacctgtttaattaatcctaaacatgaggctgactgctaattaaacagcctggaagtgactgactgaaggtagtaatttgagataattagttttggtttcaaacactcaattttcacactttctgctcatttttagaaagggtggctcattattataggcagggtgggagttgtgtaagtcattttactgctggactcttagtagctcaggaagtgggagtatcggtatccaaataggacaaagaaatggtgtagggctatatattttgctatagaatgctcccctattcccttccccccacacaacccctactcgcacatacatataatttcttctaaagtgaaagtcagatggctgacttattttcgttaggatataggaatgcacatacttttgatatttgggaaatttttacctagtaagaggtagatctcactaagttatccatggtttccttcccaggtcctctgaaaacaaacaagaaaaggtgagaaagggcaagatttggtgtgtggtttgagatttggaggggtgtccttgcgagtagtcatgtactatgcagtcacaaaatctaaccaggggaaaaatttgtcaaggtaaggtcagtatatctggcagagaaggcaaagggcaggaggaggtgggtcagatggttttcatggtcccacagtgttaacaaataagttaacacagtccccactaggagaacagaaccagaaagaatttggggttaaatgggccacgctattctgggtactctctgttacggccaatgcaggtggatccaagttacatggaagctgaatgaatagtcagcaccatggacagctccaagcacattgctctgctgctgctcccgggatgacttttacgttttaggaacttcactgtcatttcactggccactagtagggaacaggactctctagacttaggaaggttatttagatgttgagagctttacaagtatgtcaagggtggagttgaaatgtttatatagattgggaatcatctgtctacactgtagtggggactattggatcccagagtgtgcagccctgtggggaaagatggaactgcaactccgacatcctctttgagcactgacattagctgcaacatgtgatgtagcataaagttaattttttcatgtacaagtcaaacctgcatcttcaagttacctgaattagggcatcttggagtcactttgatctctgaactttcactcataccacagcatggcagcagaggagttactatacacaatcacatagctcactctcccacattattgagaaatgacataggattcctcatttcaaagaatttctggcaattcaccccattaaaagaaaaatagtctcttctaaagaatttatggtctggattcccttttctgtgatgttttgaagggggttagaatgatgtttctatgagaggatatgtggctgctggcaattctcaaatctttttgtggcactctgattatatcaataaacagtcaatagacttgcaaaactatatatttacaataatttactaaaaatatagtcttaagactgaaatggtatcaagtataaaaaaatcttatattaaattccctgttagtcattgtatagcatttatgtcctataaagccaaagccagtttcagaggtgaccttttctgatgtatatgccttcatttttctctcctttctgcaccagagcttatcatgtacagactaaaaaagcaacatcaacaaaaagcaacatcaacaaaaagcacaaatgttttgctttggctccagaaacaatggaaactaaagcaaaatgaaattctttctcactgtttagaaatattgtgcattgagagaaagtaagcctatgggccattcaaaaatactttccaattaaattggtagtcataaaactgtattttggcttcaggttgatatgtctaggtttctggtatagccttggctgtttagctcatatgacaatccatcattcttcaagattcgtcatgggttgaaatgacccatcatttgttttgcagatacctcaaatcagctatgcatccacagccccagagctaagtgataacaccaggtatgactttttctctcgagtggttccgcctgactcctaccaagcccaagccatggtggacatcgtgacagcactgggatggaattatgtttcgacactggcttctgaggggaactatggtgagagcggtgtggaggccttcacccagatctcgagggagattggtaagcatatatttatcagatgattgtatttggaggtgacagattgctgatgcctgagcatctccaagtgctctcttatctgtagggaataattggaactcctacagatgcatgaactaggctgtccactctagagggaagctgggtttattataaatgattttgttgttcataggtctatcaaggtgacactttggtgctaatttaggaagtaggactcctgactcaaatgaacattttttaaagttgtctgttttgacaagggagtttgctggcacattagagccactgtaaatttgaataaatgacatactatttgattgttctagatggaagtttacattagcaagtcattaaatttaaaaaaagtcagtggaatttaacatccaacactagagggactaagtctagtaatcatcttaaaacaatgctgaagtagccctcaaggctatacttaagcaatattcttattgtcatatttgactttttgcgtttttattcttaaaactctgaagcttagggtgtgatgaaggacaagatgtaaaaacttgtttacaacaaggtgctgctgatgtctgtcctgggcatttttttcaaggtgcttatccaagtgtctaggcattttaccatcttgtatgtgtacgatgaggttgtaaatccattccactactttgaaaacacagagcaaaacaaaggaacaacttagagcacaaatcttaactgctgatttgtcaacaacatatctttgtgaattaagtatgttgttgttacttaagtactattattcttattaagaatgaatgaatttttctataagagtaatattttgtggaaaaattaaagtgtccattgatttttttcagtaattttgagcctgaaggaagacattatgttgataaatttattgtttttcttagaggcctcgactcagagaaagatcatgggaatgatttgggcttaaccataattaccaaggacaaaaagtctgatgttattgaagtaggatgttcacttgagagacttgcagatgactgcaagcttttctgtacatagtaggacatagaaaaattataatacacaatatttagtatctttaacatttgttctacatttgtgctattgcagaaaatgtatgaaaggcctggtcttgttggacagattgggctaattgatttaattggacaactgttcacacctgctgtaagtgtgcattatgccataatctttgctctctgggaatttatatcattactgctataaaactgattcaaaacattcaattggtctttaaattatgacaaattatattatcttcttgggtaaaaatctaaagtttatccttagaggaaatgcccactcaaatgaaaacaatagcttctggaaacagggttaatgtattatttaagcagctgatgtcagttcttaccagagtgataatttagcaagaggagaaaactaatagagtatgtattgaaataagttttccacagtgatcctggacattctgcaacttgaggacacattttgtgtgcatgagatagattactataaaaaattcaaaacaggacataatctgccatttgttgcagaatccaacaaaatggattgttctaaaagttaagtgaaaccacagttttattcttttgactaaaataagaaatacttagtttttattttttagggagcattgctgtgctttggtaatactgtcacataaaaggatttagatggtgccattcattactcctgtttctatcatagtcattagcatgggagaaaataattttggtgccttgtatatgctcttgattagagcaacacatttcttctgtgttgatcttttcagtattctgtgacttgattggttgtccattctatttcagttctcacttatctggggaatggaggagggatggattgttaattaatatgcagaatactgaaaaggccaaattagtaccacactggagtatgccatggaatatattaaatatcaaaatcatccctcattttaatgacaaagattttatctagaacaaaaatagctgaaaattaaaccttttacatgacaatgatgttaatgggaatggcaaatggtagcaacttaacccattctgaaattatctgatgtctctaatgaaaattcattagttctgtaacatttgcagctcttactacaacattgatgacatctgtcaccatgttagtagtgtgtttttaaaaaaaaacctcagtagcttgagtgagaaagagatgtatacattcaatttttttggagtgtctgcccattaataaaattgtatatttccccaactcataatgttttctgtactttgttctgaatttctctttagcaacatcgattgctaagaagtttcagtgtaaattgaggcttcctctgtcttacctctgattaactcaagcagatcataatggaatgatggtgaaatgaaaattgggttagtgataaattgcttgtacagtttgattagaatgtttttcattttaaaaaaatcagacttgggaaagtgtcctttgcgaatctgggagaatgaagtttatgagtgtatggtggtcattgatcagacctcagtgatggctcttccctagttgagatctttctgagtgggagagggccaggagacacttggtaaagacaaatagccccttgatatcccagctgttatagtgtcatcccaaggcatctcttgactataggattattgctggagaaggaaaaaaacatatttggtatcagcaaatagcacagtttttctgactggagcatagtttgtttagtgaattatgggagacaaaattggaaggtttgacatagacacatgattatttcaaatcatagggtgtttattttatccttagttttctagacaatggaggtgtgttagaccattcctgctttgctataaagaaatccctgaaagtgagtaatttatgagaaaagaggtttatttattggctcatggttctatgggctgtacaggaagcaaagtggcatccactactggggaggcctcaggaggcctacaatcatggcagaaggtgaagcaggagcaaggggaggaggtgcaacacacttttaaatgaacagattttgtgagaactcactatcttgaagacagcaccaagcaatgagagatctgcccccatgacccaaacaccttccaccaggccctgcctccatcactggggatgacatttcgacatgagatttgggtggggataaatatccaaactatatcattccaccttggctcctctcaaatctcatgtccttttccattgcaatagtctccccaaatgttaactcattgtagcattaactcaaaagtccagacttggtgtgatggctcatgcctgtaatcccagcactttggggggctgaggtggagtttgagaccagcctggccaacatggtgaaacccagtttctactaaaaatgcaaaaattagctgggcatggtggcatgtgcctgctgtcccagctacttgggaggctgaggcaggagaattgcttgaacctgggaggtggaggttgcagtgagccgagattccaccaatgcacttcaacctgggttcaagctgctggtggatctactattctggagtctggaggatggtggcctctttctaacagctccatttggcagtgcccccactggggactctgtgtgggggctccaaccccacatttccccctgacactgcccttgtagaggttttctgtgatggctctgccccatcagcaggcttcttcctgggtgcccaggcttttccatacatcctctgaaatgtagggagagggtgccaagcctcatcactctttcactctgtgcacttgcaggcttaatgccatatggaggctgtcaaggcttatagtagctcatactctccagagcagtggcatgagcaatatctggggccctctgagccaaggctagagctagagtggctgggatgtgggtaacagtgtcctgaggctgcacagggcagtggggccctggacctggcccatgaaaggactcttccctcctatggctgtgataggagggacagctatggaggtctttgaaatgccatggaggactttcccccattgtcttagatattaggacttggctctttttagttatgcaaatatctctagcaagtggttgctccacagcctgcttaaattcttctcctgaaaaagctttttctttctctgccccatggctaggatataaattttccaaacttttataccctgcttcccttttaaatataagttgcagctttaagtcattcctttgctcccacatctgatataggttattaaaagcagccaggccacattttgaatgctttgctgcatagaaatttcttctgctgtataccctaggtcattactttcaagttcaaacttccacagagtcctaaggcatggacatagtgcatccaagttatttgctaaggcataacacaggtaacctttgctccagattccagtaagtccctcatttccatctgagacctcagcagccaggatttcactgtccatatcactattaacattttggtgaaaagcatttaactggtctctaagaaggtacaaagtttccctcatcttcctgtcttcttctgagccctccaaactcttctagcctctgcctgttacccagttccaaagtcacttccacattttcaggtatctttatagcaatgccccacccctcagcaccaatcttctgtgttaggctgttcttgcatttctataaagaaatacccaagactgggtaatttatgagaaaagaggtttaattggcttatggttctgcaggctgtacaggaagcatagcaacatctgctcctggggaggccttttgaggcttacaatcatcacagaaggtaaagcaggagcaagcacaccacatagtgaaagcaagagcaagagagagttgggaatgggggagatgcaacacatatttaagcaaccagatcttgtgggaactcaccatcctgaagatagcaccaagccatgagggctttgcccccatgacccaatacctctcaccaggccccaccttcagcattggggattacaattgcacatgagattttggcagggacaaatactcatattatatcaggaggaaactgctgaggagagggggatctatcagaatgtatatttaaggttgtactataagaagtagaagacaaggagaccagttcagcgtccattgcaataacaatcttggcctgatatagggcagtgataatataaatggaagaggagatagacttgggggtcatttgtgaggtgaagtctatggaatttagtaacgggacacagagcttgagggtatgaaagaaattaaagttgaacttgaaattgcatacctgggcaactaggaaaaggcaggtaccataaacagaaaagagacagtaaaatgaacacagtaaactttaggtaccagtacatagctttgtggagaagaatagcaaggaacattgatctagagccaagcaggaactgagatatagatcaaagctcattctcatacaattgatggttgagtatggaaaggtggttgctaaggtgagaagtataggggaatgaggatggactcatggggagaagctttcatataaaggtatgtgatatggtttttctgtgtccccactcaaacctcaccttaaattataataatccccgtgtgtcaagtgtagggcaaggtggagatcattgaatcatgggagtggtttccctcatactgttctcatggtaatgaataagactcatgaggtctgatggtttaataaatgggagttcccctgcacaagcattcttgcctgccaccatgtaagacgtgactttgtccctcatttgccttccactatgatttgaggccacccccagccatgtggaactgtgaatcagttaaacctgtttcctttacaaattactcagtcttgggtatatctttgttagcattgtgagaacagatgaatacagtgtgggaataatggcctagacattgcaatgggaggtaacagtatggtagagtgttctcttttcatgggtttatggtcatgggagggctctcagtctcctttgaagaagacttcaattatgggagatgataaaaggagatcctcagaaaaaaatttaaggatgatgagcagtgtttcataagaaaacaggaacttttgccagaatgcatagctgaacgtgcacagtagggttggggttagggctagggttcctacatgaagagaggtccttgaaaggaggcattttatagtaaaatatagtatactagtggcttaaaataatagaaatttatcatctcacagttctggagactagaaataaaaaattaaggtggttgcttctgaaatttgtaggagagaatccctccttgcctctattagcttctggtgtttgctgacaatccctggtattccttggcttgtagatgcatcactccagtctctgcctctaccatcacatgaccatcttcttgtgtttatctctgtgtcttctcttcttataaaaatgaagatatattggaataaaggcccactctaccccagtatgacctcatcttaactaactacatttgcaatgaccctctttccaaataaggtcacattctgaggtactgggtttaggatttcaatgtatttttcttgggagataattcagttcttaacagagggtgaagaagggtatactcagaaggttagcttccagtggtagggatgggatttgggctaggaggacaacaggttagtaataagaatgagaagggcttaagcagacagaatttggttaatggagaagcctgtaatatagcgagttcacaaattccttttggaatgttatggaattctactctcccaatcctgattcttgggtaaatgaggtaacctaatggataattcagggttccagactggggtaagtgatgggatcccagtgtctgtctggctttcctaggtagagctcccagtaggatcacaatagacactgccaacataggtgtgtacctgctgttcacctgccccactttgtaattccaagaagcttctctttgatgacacctggaatatgacagacatccagagatttttttctggcctaatttatttttatttccccttttggtcttttggcctgagggaagggaatagcttagttgctgctggttaagacctacgtgttacacaacactcagctattagatccacagtcctctatttctgtcttgttttaattccttgatataatgtttcattgacattataataaaggagttaataatattcactcatgcttttccatcataagctctgggcctggtggctcatgactcaataaatgacttcctttagtctttagacaggttccttcccttctttgtcttacattattatattatttttaaaagaagacaggataataaatgttaatgctactgctatcattataaggggcaaggaagctaaagctttatctttgaagataaaaggaatatgagagaacatatcttttcattgtagatttgcacagtatggcagcacaccttctttaatcagtcatcatgtttatgaatggcttattgaagatgacaggccttcaagtcatcattgcatacattacagggggcagaatagacctgattctgtcaaatattctatgtgtgtctttctccccctaaatttgcaaatgctggaagcttctgactattgtttgacatgttccgaatattaacatcttagagttggaagggaccagagagttgttgggatggcagattctgtttgaaatgttaatgtaagaaaccaatttaattaattcattttttgtgtatataaaatgacagttgccaaaaagtttgatagttttttttttgtgagggtcaagcaataaggtaaggaaagtttcatccctagtgtacaattgaaacgtgttcactgatcatatttttaatgtatcttagtacagttttaaaataaagcattttcccctcttgggttataaacaagaagcaagtttctggtaactgaaatggattcactttaagattaaaacgaagtattttcaatgacagaaaggaaagaatacataaacagcagtgtttcccctcagatgttcattgctttgggaaaatgacttccagcaggcaaaagtcaatttgagaaaagtattaatgttgtaaaatactatgaatgaaaggaaacaatttaattcaattgaaaattttactttatatttgtacagctgagttccattgataacaccacattttgagttacaaatcatatttaattaatattaacaccaggtaattggcaagaataacttcaaaggagggctgaggaaattgcaaattggaactgcaggtacagtgatactgtagaagctttatagggatccaaaggacatgcatatgattttaacagttattgcagaagctgatcaaatatagtgtcatttcaaagctgttcttcaccccagccattcctaatatttagggcttagtaactgccaagtagcaacagctgctgttaatatgaaacagcaaacagcattcaaataagtgctttaaaacctatgattctaatgctgtagttaagtttttagtaaacaatggcagtttgatgcagtagaaccaaccttggagtcaaaagcacttctttaaatccctctttttcaattatgagattttgttaacaagcttctctgagaattaatttccttgtctgtaaaatggatgccctgtctgctcagtaataattcaatgatataattcttgtgaatgttctttataaactcaaaagtgctacttaatatcaggtattactagtgaaaggaatggggataatacagattttcccccaaaaggcataacaaagctgtatattatcataaagatggtaggtatgttgcctggtgtgcaggatatttgaaatagcagagggtttttgcttgatttgttaattaccttcaatcttaactatatgtggctaagattctacatggaagaccagagaggaagctttcgaatgactcctgaccacctcccctctcttttccagttctcaatgccatccacccacttctgggctaagtattctaccctgtcctgtttttgtcatccttggttattgaatattatttgccatgtcacctaacagttgcttctacttgaatgtgaccattcagttgccactttaaaagggttgagatttgaggacaagtttggggtatcttgcctcatccttagcaatgtgcttccagggtccctgcgcttaactctgtggtaccacttgccactctgattgtagtgctgatttctctgtcaatcttttctatcagcatgtgttttttcttagtggaaagatcccccaatatccagtatagtacctggcatgtaacaggctcttcatgaatttctgttgaatgaccattgtcaccagattcctagttgtgttagtaatgtgagtctgggggtaaggtttgctcagcctctgggaaccaaagggcagagctgcttccaaccatgccttatgcattatctttgataacgcatgggaaccttcgggggttactgtaatgttaagtcacttagagttcaagtttttattgctagcaaataccaaaacctataatctgtaggttcatccaaccctaatctcttaggcagcactggggagtggttaagaacttctcactggctgggtttatgttccagatttgtcatattgtagcaaagggatctgggtaacttacttaatcatgttgtgccccaatttattcatgtgtagagtggggataacaattgtataagaattgggtgagatcatacataacaatgtgtggctcatggctagtgttcaacaatggtcaatttgtatttttttttttttttagacccagtctcactctgtcactcaggctgaagtgcagtggcatgatcttggctcattgcaccctctgcctcctgggttcaagcgattctcctacctcagtctcccgagtagctggaattacaggtgcatgctcccatgcctggctggtttttgtatttttagtagagatagggtttcaccatgttggccagactggtcttgaactcctgacctcaagtgattcatctgccttggcctcccaaagtgctggcattgcaggcatgaaccaccacacccagcctcaatttgtatcttgtaaggagcccatctacaccagcaggtagcctatgagtgttcttactggcctgaatatatatccaatttgctcaatgagcaaaaggcagcagagaggctaagtgctcaattaagggcagcccattcttgcattcctgaaacttgctctataccttagcagtgatcaatcttattgtttcttcacatgactaatgtattacctgacatagtgctggcccatagttaaatacatgaattcatgaaataccagtcagaaatggctcaccaaatctgcttgcttcctttttcattttgaatcttcttaagaatgaatcaattcagtgagcatttatagtgcatgtgtcaggtgatacttgtgctgggctttgaggatacagagacaaatcatggtctttgctttccagcaggtcactgtgtttcagaggaggtggagatgcaaacaattacaaattcatgtgatctttgcctcaatggaggcatcatttagaggcattgcccccaaaacactgtgcctgagagagagcatcctgcagttcatgtaatgaaaagacctggcatgagacagtggagcaggacagctatggaccccaaactcaaaggaagtacacagtggcatatgagttaaattaattcagacaacttgagtagaaacacagtttcctaaggaaataaagaatgcaaaaagttgaatgtagaatattatgccaactttgtaatgtaatatatgagaaatgtttaatatgtgtaaaatatctagtgtttgacggttcttatttcttcctctattgatgattactgtcatgtattctcttacatgcaatcagtgtgtggctttacctgacactattagtccctgctttccatgatcacccctacccagcatcacccatgcccttggcagcaattttaattttgttcagttcctgggtcttagccagggccaacagcttccacccagcatcaacccacaagttgccagggtttggaatggttttgtcatgatggaccctgtgtatggttgtcctggggtgaaccctgagcccctctctgtcactgcaaactcacagtgatgtcccaccagacatttgacttacacttcagatccttggagatggacccatccctgtattctggcctcctggttttggaccatgacatactacctattccttgtcaactttacctgactgggttgaagggtctcctcttctgcctttattctcacacagctggtaaggtttgactatgcatgaagccattgagcagaatcctggctattgtatggggccctgaccccctctagcttgttgtctttatatttctcatgttcttttagtgtcatacaaatgaataaatgtgaattcccaagtataaaggaatttagcctcaagtgatagtttgaatctctttcccagagattcccgtacaaatgcttgaaaagggccaggagcttcacatgaactgtgtggtccctgttttcagttatttattattttcctgctacctaactcctattgccaactgtattagtttgctagggctgctgtaacaaagtcccataaactgggtggcttgaataacagaattggcctccacagtttgggagccagaaacctgagatcaaggtgtcagcaggcttggatcctcttgaggctgtgaggaggaatctcttccagcctctgtccttgcttcttgtggtttgctggtgatatttggcattccttggcaagtagaagcatcacttcaatctctgctttcctctttacatggcatctccccagtcatggctgccggattgagccctgattaatgaagttctgtctgacccaagcccatatttgttctggttctttgggtgaattttggccctgggattacccattttctcctgagggattagcttctgtgatcagagccttgccagctggtctctgcatgcctcccaagtcatgacaggaagtgtgcttctctcccatgctcagccccaaagaaatcacattcttttattttcctttccaaagtcatttccttgttaaagccattgtgtttggaaactccagcactagatgagagctttaagatgcaatctgtacttactgtgttgatagaagaacataatataaaaacacccttctgcagaaatgaagcaacatcagaatctatttatgtcattttttataggccttaaaagagttggcctgagaattaggagtgtattttctcagtttacttcatcatgtatcaactaagcaacaaatatagtttccttgaaaataaatggcttcataatataataaaatcagaaggctagcagatgaatagttgattgaaataggtgcaaattatttcaggggttacgtccgttggtagaactgggctgcagagtctctgtcctctaggatctgcatgtttgacagactgggctttgttctgtgcttttttcactcttacctgaccaaaaccatttcatgattcattgggggtcccacaagaggaaggcagaggaatggaaagaaagtgaaactcaagtcagcatattttgtttcttgttaacagctctgggaagagatttggttgggaaaggaatttcaagtaatgatttaaacatattttctggcagttgtagcagtgaggaaaaaaataatctctcttgtagcagctcagatacacttccaaggcattggtacttatggtcatacgactctagagttacatttacatcatgaatcatggctggcatgtgcataacgggctattaagggaaatagggttgttcagaatgcattgctagccttgtgtgtttcatatcatggaggacaaccactgttttcccctttaaaatgttgcttgatgatagtgtcagaggaaactctgcgatagatggaattattcacgtgagctgatatgacattttatttaacaaatatttgagcccctactgtgtgttggggccttgttctaggtggtagggatatgatgctgaatgagtcagacctgcttccagtccttgtgcagtttccagtcaagcttaccctctttgcatttttcatgtccttgtagtctcagatctctctaggctacaggaattttgcctaagcctacagagtgagatgccatgaacagagagtccatgaaaaggtagagatggcctacatctatcataataactacttgaccccttgggtgttctggagatgctagagttcacttgaggtgtctgtggcatgctgagggtaggggtcacacatttgaataagaaagaacatgtgtgcatgtgtttttgtgggcacacacagaaggctaggcctggaccgaggaaggagctaggccagcttgccaggtgcagttgtttgggagcattgccaggtgcaggtggcatgaagaattccattcaggcttatggagcacagatcagagatggtggtgttggtgaggacctgaacatactgccacatggcaagagagtcacgcatgccacctcacagcctggaatccgtgcatgtcctctgtgttagtttggttaacattttcttttccttcttttttcttttccccctgagacagagtctcactctgtcacccaggctgtagtgcagtggcacaaccttggctcactgcaatatccgcttcctgggttcaagtgattctcatgccttagcctcccaagtagctaagattacagtcatgcaccaccacacccagctagctttttgtattattactattttttagtagagacaagatttcaccacgttacccaggctcatctcaaactcctggcctcaagagatccacctgccttggcctcctgaagtgctgggattataggcgtgggccaccgtgcccagccaatgttttattttctttctgttcacagtttatttccaggaagccttctctaatcttcatcccctcctcttcccacccaagttagatttctcttctatgtattctgtcaaatgaaaacaaatccagacttagataaggagggattttattcaaaagaaagaccattgccacagagagaatgctccaacctcagaaattgtcaagtgtcacaaaatcaaaaagaaagaggcttccattatatagggtagggagagataagcaaaagcttaattaaaattgtaaaagggattaagcaatggagggatgaccagtggaacgggggaatgaccagtgggatggggtgatgaccagtggggcgaggtgatgaccagtgggacggggggatgactagtgggatggtggggggggtcatcagtgggacggggaatgatcagtgggatgggggatggtcagtgggatggggggatgaccagtgggatggcggggatgatcagtgggttggagggggagtcatcagtgggccggcggggaatgatgagtgggccggcgggggggtcattggcgggacggccggggggtcgccagccagacggcgggatgaccagtgggaccgcgggggtggggagtcatcagtgggacggcggagggatgatcagtgggacgggagggatgaccagtgggaggaggggatgatcagtgggatggcaggggggtcatcagaggatcagtgggatgggaggatgatcagtgggatggtggggtgggtcataagtgggacgggggatgatgagtgggacaggggagcatgacgagtgggatggggggatgacgagtgggatggggtggatgatgagtgggatggggatgaccagtgggatggtggtgggggggatgaccagtgggatggtggtggggggatgactagtcatcagtgagacggggatggtggtgggggggatgaccagtgggatggtggtggggggatgaccagtcatcagtgagacggggatggtggtggggggatgaccagtgggatgggaggatgatcagtgggatggttgaggggaatgatcagtgggacagggggatgatcagtggaactgggggatggccagtgggatggggaggatgatcagtggggtatgacaggaattgtcctgctgtggtcagctgattctcagtgcaagctaataagggggccacattccagtgtttagtgctttctcaggcttggggccaagtagaattcagggacctgtaggaaggagagaatcctgactaaagttctgtcaaggcaaagtaagagggtaagaggtgaaccactgtgaacacttggtcagtttctgaggtcccatgcagacatcttaccactttttaaattattcccttctttttcttcagaggtggaaagcataccacagacatctttcattagcactgtagctgcactgtctagaagataatctgagagtgcttgttgaatgaaggaatagatggacatggcaggtgagtgcatgctggagacaggacatcaggaagtaggtagcttggagaaagtcagatggcgtggctaacagtccacataaaaattgttctgtagcagaggatgggaccctgccctagggtcagggctcagcatctcattctgtttagcaacagttgagagacatgggatctgggttctggggcatgccagtgccgcaaccggagggcacatgggaaggaaggagagccgggaatcagaattagggacaggtttcagttgggaaacagaagcagtagcttaagtacatgatagcaggattgacacccaggttgctaaacttgaatctgaaaaccagaaccagatagtagatctaccattcttagattaagaaccagagatctgctatgtcagacaaatagagtggatgcaaaatcagaagtagataaatctgatgaatatattattcctctttcaattggtttggaatgttccaggtatgtaacatgagatgtgagtcatgactgcaagatgtcctaaggtctaaagcttctgctattgagtcatgactccaggccctgatgaacttgcttattcaccattcatttaacacataattggtacccaaatgaagttccaagaacttgttaggtgctgggaatttacagatctggtaaaagcctttgaagggatttgatttggagagatatggtacagttgaggtacgtgtgcagaaactggattgcagggtcaagatggaagcagaagattagttagaaatctattgtgtgtctccaggcaagagctgggattggcttggactggagtgggaatgagggccagaagcaagttggtattggcacaagtggtcacaaggtcccaggcatggaggatgggaatcacttgatgctgtggggatctatgccattgaaacaaaactcatttaagacatcttggccaaccgcagtttgtgtcctggagcccttagattgggatgggcatgtgcagaatgactatgtggctccccagaaagaatcccacagagaatgatgcagagatgggacatcagatgaattatttcctggcaaaattccactcaagactcagcatcaatgatacttccttagtgaaggcttcctgggttcccttaagtagtgttagatgagctctattctgtgattgcaacactgtgtgtgtacctttagtaaagaaagcatttgttttactgtctcagacaggacttaaatgtaagcctatgaggcaatttagggtacaaaaacttaaaacagtataggagtaaatctgacttctcaggcagggttagctccacattttaaaatgaagtctacaggaatgtgtcttgctccagctctgggctctgctttctggtgtgctggctatatgcttaggttttgcccatgtggtgggaagatggccaccagcagctgtaggcttgcatactgccagcttagtaactgtattcatttcccagagctgccttaacaaatcaccacacactgggtggctcaaaacaacagaaatttgttctcccacaattgtggagccagaagtccaaaatcaaggtgtaggcagggctggctccttacagaagctctgagggaggatctgctccatgcttctctcctcggttttggtggctgccaacaattcttggcatccctgccttgtagctgcataactccagtctctggcttcattgtcacatcacctttctctctgtgtatttgttattttctccttttctgtctcttataaggacacttgtcattggatttagggctcactctattctaagatgatctcatctcgaattccctactgcagttatgtttgcaaacaccttattccagataaagtcacattctgaggctccaggtggacatatcttctggggtgatatagttcaacccaatacagcacctttagtggaaaggatgtgcttcgcttccaattgtgtccgcagaagtccaaggcttggcccccactgtacaagaagtgacagttcatcactcaagcaatcactgtggcctggggaaggtgctattcactttagccatgcatgggacatatgcccatttctggagctggggagagaaagctggggtgagctccacttgaaacatatggtcaaagccacagagaggtgtcatttcttaaagctaaagtgtgatgctctcctacaacaagaagaagagctgcctggcaggtgaaccacacagatgtccattgcacatgctgtatggtgtcagtccattgacaccactgcgttctacgtagactgtaactttctcaggggaattagcaacctggtcttattcatcagtgcccagggcatgaaagagctctatcaacatatgttaaattcagttacagtagccaaaattcccctgaaaaataggatctaaatgtaaccatgcatcataatattcatcagaaatagttttggctttcatctaaatgacaacaaagcagtttcaaggacaagaaaaagcttctgttagagcattctccccagctttgtaaaggctctccattctgtgctgccttcaccaaccctagtgtgttggcaaccaaaggaattaacccagggccttcatggttattgagaggaaccacatctacctacacattagttatctgtggcagaatgcagacttcactcaccaccaccaccaccaattgagtccagtcagtgaaaatagcacatattgcataccagctaaagggcttccctaacaggacttctcactaatgggtcactctgaccactagctaattggatggcaatcagaggagccctggcaaaaaggagagaaatagacattttgtttgactgtcataaacatggctgagtcctctatttttaaagaaaatattttatttctttttatggtttctaaattatttttcatttcctcatttaaaaaatggaattccatgtgtgattgtcaggaagcatggaagccttgtttgtactgtgaatcgtgaagcaggcaaggcactctgggggagccctattattgagcactgacttttaaaatgtcaatgtaactggtatatgtgataggtgagactccacagtaccacttctttattttaaaattttaaatttttagattcttcatttttttatttcattttattatggtaaaaagtcttaaacataagctctattcttaactaatttttaagagcatgctgcattagtgtttactgtgggtgcagcgttgtacagcagatatctagagcttattcatcttgcttgactgaaactgtttgcccattgattaaataactccccatttttctcttcccatagttcctggcaaccatcattccagattttgattctatgaacttagctattttagatacctcatataaatggagtcttgcagtacttgtctttctgtaatgggctgatttcacttagcgtaatgtcctcaaggtttgagttttgtttttggaaacttcttaattttgcctcttcctactgattttacacctgtgaagtctaggattctcccacccccatctggaaggtatattggtctcatactcttcgttctctattcacttctaaatatatgaaaagtctcatttcagttattaaaatgtccagtcctgtgtaataaaactgaaattcagccaaactgaaagtttctcccctcccacagcttggtgttgctctaagctggaaccctgcagtggagaagggcctgggactgaggctggtttcttctctgctgctcctttttctctttttctcctgccccagctgcaggtcctgtgttaatgtcctgtcacagttaaggaagcacctagcagcaaaggcattcctggtgtcaggtgtcatagtacctgtccttaactggaggtgctctcctttccacccttatttattttttccttggagaaactttagttttctccccagcttttggcatcgagccctccctgtgggccaacatatgcttcaggtctttatctcagcagcatgaacttgtgagttcagcttttctctcccttgctggtaaacaacaagctggagggaggacttgattaatgaaggtggaacaagagcagaactctggtttcttttatttatgctaaaacaggagatgtcccttggtcacattccataagatgcactgcaccctggctatgggcacaatgctgtgataggcactggagacggacacaacagttgcccttcaaagtttagagccaagatgagaaaataattgctagatatacacacataaactatgcaggtgcagaggttgaggtgactggttccaaccagggacattatgggagggctttatggaggggaagcttgggctaggtactgaaggaaggggaggtgcatgtagacagagaccagggaaagagataaaggcatttaagacaatgtgtgcttcactgagttaaagactttcattgatgactgctcaagattgcttcggaatttggatacatagctttctgaattgtttaaaaaaatactgggccaggcgcagtggctcacgcctgtaatctcagcacttttggaggccgaggcaggcagatcacgaggtcaggagatcgagaccatcctggctaatatggtgaaacctggcctctactaaaaatacaaaaaattagatgggtgtggtggcgtgtgcctgcagtcccagctacttgggacgctgaggcagaagaatcgcttgaacccagaaggtggaggttgcagtgagccgagatcatgccactgcactccagcctgggtgacagagcgagactccatctcaaaaaacaaaacaaaacaatcaaaaacaaaccaaaaactttgcttcctctggcatgaatgcctttgttttcttcctcacttcgattttatgatccagagggcccgctctattgacaataggtatgtttccaatattcttgatatgcatactcaagatagattaaagacttaaatgtaagacctaacaccataaaaaccctagaagaaaacctaggcaataccattcaggacataggcatgggcaaagacttcatgactaaaacaccaaaagcaatggcaacaaaagtgaaaatagacaaatgggatctaattaaactaaagagcttctgcacagcaaaagaaactatcatcagaatgaacaggcaacctgcgaataggagaaaatttttgcaatctacccatctgacaaagggctaatatccagaatctacaaagaacttaaacaagtttacaagaaaaaacaaccccatcaaaacgtgggtaaaggatacgaactgacacttctcaaaagaacacatttatgcagccaacagacatatgaaaaaatgctcatcatcactggtcatcagagaaatgcaaatcaaaaccacaatgagataccatctcacgccagttagaatggcgatcattaaaaggtcaggaaacaaatgctggagaggatgtggagaaataggaatgcctttacactgttggtgggaatgtaaattagttcaaccattgtggaagacagtgtggtgattcctcaaggatctacaactagaaatactatttgacccagcgatcccattactgggtatatacccaaaggattataaatcatgctactatgaagacacatgcacacgtatgtttattgcggcactattcccaatagcgaagacttggaaccaacccaaatgtccatcagtgacagactggattaagaaaatgtggcacatatacaccatggaatactatgcagccataaaaaaggatgagttcatgtcctttgcagggacgtggatgaagctggaaccatcactctaagcaaactatcacaaggacagaaaaccaaacactgcatgttctcactcataggtgggaattgaacaatgagaatacttggacacagggcagggaacatcacataccagggtctgtcagtaggtggagggttgggcgagggtttgcattaggagaaacacctaatgtaaatgaccagttgatgagtgcagcaaaccaacatggcacatgtatacctaagtaatgaacctgcacattgtgcacatgtaccctagaacttaaagtatttaaaaacaaaaaacaacctgtggtctttccttccaccagccttcagtagcagtgactcctgcactgacaccaccagtatgagtgggtaagttagtgatgggacagaaacacttctcaagatcttcaggcttggccaaggtgagtgaggcttagaatcactgtctccctcagtgatgatctactctgcctttctgtagatgtgacacaattgtgccatggcttaattttattgacttatagaatctaaggcttattacaacctcatgtcccccatgttgtcaatggtcttgtgtccacagagaactgtaacattaatctataatgaaggtgctctgtggttttatgtgttatttataataacaaacatggtttatagtgtatctaatgccccttcgtctactcccacatttcaggtactcaaatgcatagctgttggagatagcaagaggactacatttttacttattttcttaaaatattccaactcctattctgttttgtgtttaaaaattctagtgtttgcaaatatcttgaaggaacagcctagcctcgctctatttttaatattctaccaatccattctgccttgcccaccaactctgtttagaggttgagaaacatctttttaactcctaaaagatcaaaaatatcttatcaaaactcttcccaaggaaaagtagacctacttgctatttttaggcaccttcaatgatttttaagccccgtattacattatgagatactaagtacttttttccctcactaagggagcagataagccacaaatgtattctctagaagtttgtatctctgctaaggtctccaatacatgtatgaagtacttgttctcatatttccgggtagtatgttgtcaggtgttcaggttccccaaatgaacagaacatagcactgtctcctagggatttatagtctagagggggtgttacttacagtggttggtaaattctgtactgaagctctggaaggacagggatgaaggtactttattttgcccagagatatcaggaaacactttcagacaataatggtgtttgagccgattttgggggaaaagggagcagcattccttttgtgaaagaggggggcagcatttgcaaaagtttagaaccaaggaagggtaatggcaatttcaaggaagcagattttgttgttgttgttgttgttaggtaggatgcaaggagtatgggggcttaggaaagggatgatggggggaccttgtttttaaaccaaactaaggaggtagggcatttgaagaattatataaagggcagcagcgtgaccagatttgtgtttgagggagttccttctgatggtaggctgaaagatgaatggagagattcagtccatctgtaggcagcaggttgagttagtagggtgttgcaatagtccaagcaatgaataacaaggtcctaaataaagctgtggttgcaaggatggagatgaggtgactagtaggaagacctttaagaagtagaatcaaacaattgcaagcaatggggtatacagagtgagggagaaggaagaggcagggatggtgctcaaagttttggctttggcacctaggtgaataattatattatcaacgaaagtgaggaaaacaaaaagaaatgctttgaggtgaactaatattttaaaaaatattattgagtaccttgttctgttaagtgcacaagtgtgatggttgattttatgtgtcaacttatctgggccaagttgcacaaggtatgtggacaaatattattttggatgtttctgtgattcttatcccatcaggtgaaggactgaacagaagtttgaccttccctgagcaagagggaattcctcttggttgtgtttctgtggagaaccctgactaaagcaacaggctttgaggccatgctgcctgggttccgatcccgctctggcacttgcctagtgacatcactgcgtgactatgttagacaaatgatttctccaagccccacctgccacatctgtaaacaaggttaacaatgttcttgacttcctatggcttttgtaatgattaaaagagaaaacccatgtaaagttttaagcttaggatccagcatgcaataagcttttaagaaatgtttgccattattattataatcgaggaaacatttacgcagtagtgttaatgactaataacagctaagattgttactttcccaggagagatttatgtcataatagggatcagagttttccattagaagaatggaaacttccattagcctcttagcttaatgctttgcacattgaactaataggtaaatattcattgactggtcgaattatttcctggtatcattgagtgggattgagaactaaagcaggttaagaagggagaaactgaggcccagagacatgaataacttaataaagatcatagagtgagttacaaggaaagactagcaccagggactcaggtttccttgttcctggtctattggaacaaggaagcccacccctgaatccataccacataaccaatccccaggctgccacaccagccctggcagaatggactacattttatatcccctttggcaaaatccctaaagagcttattcctgaacagaccaaaatatataaaggcattgtattttttaattaaataaaaatgttttcaggattatcagcccatgtgaatatggaatgaaagaaggcaaagagcggtatagtttgttctcttccttttctggtgagcatctgcaggagcagtgtgggctcagtgtgtacccactgactctgtgttcactctcccttgaatcccctgccactagacttcctctctactcactctggtgaaattactattactttcttagaggttctttctgaggccaagtccaaggccttttcctggcttccttccttcttgacccctttgcatcctccagcactgctgataccttcagaaattgtctcctttatcagcactcagaattccttctcccatgcttctctctctgcacctttacctcctcccacccgtgatggtgaatatttctaaagaaactgttcttggcaatctcatacaagctttcagtttcaattgtcgtctctatgctgatgactccccaaatgatatcttcagttctgatgtctcatctgagctccagactcacactctctcattcatattcatttgctctccctttttccctctgcctcctccctccccttctggcccaggcacagtactaggtgtgggggtttacccatgaaggccacagtttctaacttcgggttccaggttagtgggagagagacaggcattaactcacccaattacagcacttctgacaatttgaaaaatacagggcaaagatgtacctaaggttctgtgggaacacaggtaaagtaaggttactaatgtttcactctctctgggtaggggtgatgccaggtgtggctccatgaagccaatatctgcattgcattgtgaataatgagaaggtgttagtcaggtaaaagggctctagggaccatcctgctctactgcacagggatggagaaggcaagcatgtgtttgcaatggcaagctgttcagtgtgactggggcacaggatacatggagttcagggtggaggcaggtgggggaaatggggtatgagagaacaggctgttctgggcaaaggctagcccagaaaggacctttcgtgctattctagggattaagtgtctgctaaacatctctaattagaatctcatttctatattctctgacaccgaaatcttctcccttaaatatcgctgctgaccatattaaatttgagctaacaaggggatactgaatgatgaatgttttgtttatagaatgcgtttatttttggtaaagggaagaaaggttgcttttgatggcaagcaggaaagagccatcccaaaactagcttaaataatgagtgcatttttcttcctatatagcaagaagtctggaagtgtgttggctggttgtgtccctctgcaaacaaaggcagcgaggatccagctccttcccactgttctgtgcttctacccttagcatgtggtctttcttatcagtcagccctcattgtctcctggtagcaggtccagggatcacaagtaaatggtgacatctatagaaaaacaaagggaagtttgtcttaaaatgaatctctccatttttttttttaagagccaaaaagcctccagagacttccaggggacgcttatatctccttggccagaattcagtcacatgcctacttttaaattaatacctgggaaaggagtgagattacaatgactgagttagactatacattctcagtggtggcagaattgccaccgtggtgaccaaaattggttcttggggatgggggatgtgctagtttcctatgctgctattacagatgaccacaaatctagtggctttaaacaagatagatttattatctttcatttctggatgttagaagcccaataattaagggctgtaattaaggtgtgttaattattcagcagagctgtgctcctttcttaatctattttgctctgttttccagcttccagaagctgccagcattccttggctatggtccccttctatcttcaaagccagcaatgatcaagcgagtcttttttttatgatgacctttctcatttatgactcctctgcctcccccttcccaatttaaggacccttgtggttacaatgggcccaccagaatcatctgggatcatcttcctgtctcaaattcagctggatagctaccttagttccatttgcaaccttaattttcctttgcagtgtaacctaccatattcacaggttccagagattagaatgtggatgtctttatggggctgtttttctgtgtaccacagggacaaaaataatcttaggtgttacaatcgtttatgttcctccaaaggacattgtatctgtggaattaaacttttacaggatggggacggaggtttgggagtacttaaggaaaaaaaaatacctacgaagtctccattgggggcctttttgtttgataaatactgggtataactaactaaactgagattcaccagttgggctctggcagggccaatgtatcccgaggcaaatggccactgccaaccagtagtccctgaggaagaaaaaaggggaaacagctactgggtctacagtaggtaggatttgctctaggggagttgtttgaagctgaggcagggtagagaaagggtaatcggctggcatgaactttggcagggaagatgtcatgcaaaatccagttggtttctgtagctgttagcttttcctcactgctattttctatttgtttttatctttaaataaaggaaatgatgaaatatctatccttagaaggcatcaaagtttgattgtcattaactttaaaaaatacacggctgggcgtggtggctcacgcctgtaatcccagcactttgggaggctgaggtgggtggatcatctggggtcaggagttcgagaccatcctgacccatatggtgaaaccccaactctactgaaaatacaaaattagccaggcgtggtgatgggtgcctgtaatcccatctactcgggaggctgaggcaggagaatcacttgaacctgggaggcagagaggttgcagtaagcggagatcataccactgcactccagcctgagagacagagcaagactctgtctcagaaaaagaaagaaagaaaaaagaaacacaaagcccacatgtatatataaataaatgtcattgcctaatacttcaattatgcttatatatcatggttggatggcttgatgtaacagtatctggaagatgagatcaaaattattgattagaagtgttaagttgaaatttcctatttctttcatacatccttttccttatagatgaatgtcaatttttctttctcaccaaccgattgtttatctagaagttactatttgaaattctattacttaatgaagtgcttacaaagctttggaaaattactcctaattctaaaataattataccacgtatccttagtcaagaaaaattggcatttatgtgtgctttagcaatatttagataggctgttacatttcttcctttaaaatagccctgattgcaatgcaaattgaaagctgtgatgccatcactgaaaactgggatggggaccatcttctcaggttgatatcctctgtcgacaatgggtgtctctaagagccatgttgagtcatctttggatcttcacactaagtgtggtcttttcaaccaaggctgtaccgtgcatcatcatatagtcatccccatgacatttgtaccttctctaacaagagttatgattgccctcagctatcatgataatcgccactcttctgtcaggcttgatactaagattggaggagctgctctgaagattcagtttcattctacaaggattattaaacaccaattctatgccaggaactgtgctagaggagctaaaagggaatgatctatgctgctaagcggctatggtctaacaaggtagacggatggtaggacggtggtgtgtaaaaagtgtcatgaaagcacagatggaggagtggaaagagggaccaggaaaggctgccaggggaggtgacattccatctggatcttgttagtgcaaccgaagtaagaaaatgctattttaaactattgccacgttctaaggagggtggaaagaatttggatatgcctaggactgtagttggtatttgaatagacatggctatagccaagtcactatagatcagggtttcccaacctacagccttctcaactctgtgacatttgaggccagataatttgctgttgtaggacctgtcctgtgcattgcaggatgtttaccagcatccctggcctcgacctactacatgtcaagttccggtacctcctcactgaaacaaccaaaaatgtcttgagatattgttaaatgttcccccgtgaacaaaatcccctccagttgagagttgctacttctaagtagtagaacaagaaggatacagaatctcaagcaatcttgaaaggaggagaaagggggagcaagataatgagaaagaagagtaaaaataagttaagaagatggtaaaacttgagttaccaagggggttgttacctggcagagaacgtaattaaaaaatgggcatgtctactggtcagttcgaagtggtttgttttaatgcaaactgactctatatctcatactctcgtattcacagtggccctgtgtgggtggtttttattttgttttggttaggagtctttggaaggggtttgattttcacatatgatataggacagagaatgtcaccttcaccccagtagctaggctataactagaacttgtgttagaaaaggagcttagaagcacacaaggctggaacctgctctggaaatcacagcaatttgggggaagttcatggatgcacatgaagaacaaattaaggtttaggggaatacagtttaaatttcaaggaaggaagagattctggttgagatctgggttacatgggaaagaacaagccagttagagaaatattacttatgaaaactcctgacatttgcttggctgaacaccagagagagggctagagtgaatacctgggctctctgaagacctcttgaagctcttattccagcacagttgccctgctcagcacagatacagacacatactcacacagacacatctgcacacacactccattgaagacctggacttaggaaaataatatggaaataatatgggacacacagtaacgaaggctataaagggagaacagcacatacatatggggtgcaggtagtggtcgaaggattggactggctcacccttgggctctgtgtgaccctggaagtcattccatctctctggactttagtttcttcctcattaatggctttgattggcctaaattgtccactgtttaaccacagacagctctaaaatactgtgaatccctgagaatgataaggcataactgacgtgacttctgttctccacttgggcagtccttacttagaagggcatttgtttatagagtttgagccagaccagcccaatgaatgccaaagccagttttggaatggacacgatggccaagagcagagcaaatggccctgtaacagcttggggctctagtcagccaccagattcctgggcggtccctaccaggtcttgctcttcagggactccttaaagggcattaagatctgggtgtcgtcattggaggaaacttaaggaataaaagagaagaatggaggaaacttaggaataaaagagaagaatgggaaaccacttccacgtcaggcgctaatcctcctgagcagcttcctgcctcatcccagccttggggactctctctgttctttctgctttcctgggctcaaagcctcactccttttagtaactattcattgctgataatgatgaatgaaaactgaccttctcccccagatactctgagtgtttgctgtgctctcaagatggatctgaacatggaacagaaatagagggcttctgtttaatgtatattacagcattaaaagtctatttgcctcatttttctttccttgtcctcaggttatccatccctgtttgggattcagggctgccttcatgaatgttttgctatactatgtcaagttgtttaccaatttctgcttctaatgcagctgtcagatgctcaaactgtctattagtcgaagaggctctctactgaccacctttctcaagtttcttcttcttacatacaatgtttttgacaagactaagcatatcaaaccatcttttaacaattgtaaagcctaatattggccagcatacaattcaattcattaaacattgtagcactgtctctgtgtcaggccttctgctgggtgctcttgggtggtataaaggtgaataagatagggagtcattcgcctaactaatgctacccttgtcagtgaaactggtgggagcttgggagacaggtatgggtgagcaggctgttttgccctctttctttcaggatcccagtgaacattagcccaaccaggtggttagtgctggctattcacatgccttcctctccctcccccaataatgggaagaatccccttggcaggtggctcaaaaacaggtctggactatgtcataaattagattcaacagcttcttggctggcttcgtaggccactactactccctccacattatcccattcaaaaccaaagaaggtagatttatatcatggataataagacaagtgtccttatttattcctgatttctctgttgttagatgtacctccccccgaccccctgccccacatatacttcgccctgactaaaagtttaaaattccaactaaaactaatttatgaatgcatttatcaagtaaatattttagtgtatttctatcaattttattttttgtaatcacttccattttactaaactatgaatatagccaaattttctgtagtggtccattagctaagtaattgtgggaaatatgtaattataaaggacttaaagtaatgctacattttgtggaaaacactatttgttacctgtgattaactgggtaacctatagattgagcttaaagcctcacctggtgaacctataagatcctggctgccaccatcccatctcccacctttacccctgagatctttactaggaacttaactatggacagcatttcttaccacagaaatctctgggaaaataaaataagcctttatacaaaatgagtaagactcctacataaaatgtggctgtctataggaaggaaacacacctataactctgagaatgaaattagtttcaagaatacacaaaggatgaagccagtcttctgttggaatactctgcttgggagactgcttgtaaatgagacactcatgaacacctgaggagcatcttaaaatccaaagttttcaatcaagagatcagggtgagccctaggcagggcttgactctgtcagtgaatccaactatccagctgtggcaggaggaaggcactaacttatccaagaggaggtgccagcaagagatattatcagtctagcttttaaaagggggagtggtgagcatatagaaggcagttgattaatatccagcactgttaggagacagggccaggagactggatgaaatattttggtcttacaggcaaagcaacttgtataatggggaaggatgctttgggttatctcgagaggcatgtctgaaaatcatcttctcatttcaaatgatagcgtgggttattgtgagccagttccaaggtggctagcaaaattgagttgctggatatacaaagctgagactcatcacctagaacagggcaagtggggacatctcagaagctctgtccccagaggaggagcagccccctgcctcattcttttccagtacacatattgtgaccctctgctgtccttgtcctttgcctatattgcacaatttcctgctcagatgtgatgggtgaatgaaaattggaaatgtaaaacattgactatgtggaattaaattttcatgaatgacaaaaagactgagttttacactgaagtccccagtagccacccctaccccaataatgttgcccatgttctagattataatcaacagaatactattttattgctaccttctattatttaaaagtttaaaattgtttggaatatcagattaattcaggatactattgtattgccatctgggcttatcagtagcaactacttccatttccaagtcttattaagcaaaacacattacagcaatttgtatgtgaaacattacagcactactaaaacttctataatgctgaaaacacaagttaaatgaaaggatactcctttggttacctaaggtttgattaatgtttcagtcttgtctgtagaaggattttcaaggacaaaaactccttacaaaaacttcaaactatttaagagccaatgactcatattcaacaggactttctgtctagttggaggagcacagtcttattatatatataaaaatgtctgaaaaaagctggttgcaatctagaggatcctctggggctgggtctctcttcgagccctccatctggtggcttgctcccacctcatgattcgtgagaacctgagtggctcctaaaacttgaacttcaaatgactcatgctgtttctattaatttgcggggtcagttttagtttcatagactttgggaaagccaagccaatcagcctgtggagttagacaaaataataatcattcccctgactaataaaggtccccacaccattggggggtaataaacgagtcttgtgggtgatgcagagaacagagcctgtactttcattttcctgaaagagtaagtggaagcttctcagctagtaatccctgacccctctaaaagtatctgtcttctcaaaacctgcaaccattataagcatcctgaaggatcatcttcagggtttcactgatggggcgcagatcatctctctgtacttactcatctgccccctttgcagtcatggaccattactccgctcttctgttcatgggttcagagtgatccagaggcactggccttctgccctgcatgccttttgtgtggctgatccttcctggcttttaagcaattttctaggtccctccagtacttagaagtttgatccctctcaaaggtctgctcagtgggctggaatcgggtggtgtttgttcctgccttctgggcagaggaaggcgttcttcctacagctgtggcggtgatgactgactctccttctcatttccccttcactttctctcccctcctctgagagtttttcctgtagaatactactttttgaaggaaaagggaaaaggaagcgaggatggccttttttgaagaaagaaaaaaaaaaagaaagagaggtgggctagctttgtctctcctggtgccttgtcaaaataaaaaaaagtgaactagaacagtgtctgaccttatcttgcccatcttcaagaactccctaaaaataatgtttaagatgtatcatgtgggttggaaaaacacctacagctttctctccccaaattgaacatcctttgtgtttctctgtttctaggtagcactctattttcactcattcactcattccatcttactgaattaatatttttaagtgccccgatttgtgtgttgagccagatgctgcaaaaaaaaaaaaagtataatatgagggttcagcatttagtgctggcaggatgggcaacaaacagacataaaattctcatgaaacagtggaagaaagcataagtttgagaacaaatgatgcagatataaatgctaaaaagtttcagagatcaatataatctggagtggttgggaaaaaaaaatccacaaacacagtgagaccttggagaaccttaaaggccaggctgaagatcatattttattctacagataatgggaaacttttaggaaatatgttagcagtctcagagatcctattggaagaggggcgcacataagaactctttgtgggtatgaaagaactggctcagtaaaatgtgaatggagagtttgtgcagatagggagagcttctgacaccctcaaatgcaagtatgaggaaaatgaagggagaatgcttgctgagctgagactacagggtagttgggtgtacagggtgatgtttgggtgaaccaggtgtgcacaggcaaggaaacacgatatattacacagaatggtggaagctagttgtctatgcctgaaaacagcataaacctcaccatgtctcggtgggaagaagagcggcactgaagacagcttgagtaagaactgagcaatcaaagggaatggagagaaactggagttcagggggtaatttcagtggtatcagtggcattccacatagcaaagctgggcatgtgggagtagagagggaaaatactgaaagcaaagatacctatttctatttttaccatactgaatttcagttgggggtctgatattcagtttgaaaatcttgagtggagaagaggccagttggatttatttctggcaaaaaaaaatatgtatatatagaaaagatcaactatgaacctcaaccatgtcaccatatttttaatctattaatttgatttgcattcagagaccacattatcttttgagttacagtgtttcctattatctatgaactgacctctacaaataagaagagaaataggaaaaacgtctgagttgccaggaagggttatttccacctagcttttgatccagtccgaccaactaatgaatcccccgtcaggggctaataaaggaggcttgttgtgagtgatgcagagaacgtagctctaagtggtcttacattaatgtctgttcaccttcatgcttgactttgagtctaatgacatccatgcacaaagaaggcagggtgaggtggtcttaaatcattatctgaacaccaagtctgtagaaaaaaagtccagttttaagttcattaagggatcctgctgaatactctaggatatcaaattaaccatttgaaaaaaccttttaaagttgagttgaaaaactaggacattttttcaaatcttttgtgattccgttttttgaagtgaataaaactcagagctttttaggtattttttttccccagccacgatgaagagaacattaaaggacatttgcttaaactacatacgtcaagtctaagaagttactttggagaaataacttctttggcagtgatgttattttctgtgaaatagtaaggatgatctggaacctgggactcagaaaatgccgtttgcagacccagatatttggactagctagacgatttggaaggtaaaacgaaggtacctattctgttacattatttaatgctgttagaaactgaagatgaaatggcctgtttcagaatttttcttaggcaggattataatatttccaaaaagaaaaaattacctttcttctcttacctagtttaatggctagagattatgggctttgaattcagcaagagacacgttccagtcttaactttgctgtcaccagttctaaaaccctgggttattttccaagtttcatcgtctttaacatggggataatcatagtcccttcagttcagaattattgagagagttaaaccaatttatttatacatataatgtgcttgtgagaatacacatggtgatagctcttaattttcactagtaataaaagtcaaaattgaggaaaataatccctgtgctagctcattgttttcaatgagcttctgggacacatcatggtttatggtgacttgaagcgtctttgcttggacaaggtttaggaagagttattggctgtattgacttctatgcattatttcagaaagaactcccaatttctgtcatttttactgttcaaagctggtggtgaactttatctcatcttccatttgatgcctgtgtttgtgatataagtaaaaatcaacttcagaggttttaaagggtagtactcactgttccacctggaaatcatgatttttcttagaaaacaatcaaacacagaggcgctcagaatggggcttgtatataatgatccttatgtagaaacaagcacacttgtcgacagatacacacataagtgagtggatgaattgattgtccaagtgcattttagaatatttcaagtacaaatatcaggttgtctctaccagatatccacttattttagtgaatggtatttttaaagacaagttagatgttgaaagctaaggtaaatttaaaagaaaatgaactgaatgtgcccatcatcctgttactgagattggtaataaatcgtgatgacgaataatttttcaaatttgatagtgacctatttgtttgttttcagataggatattggcagggaaaaaggaaggaaaataattaacatttgttgaacacctactaatgttggacatagcattctacgtttgctattttatgacttctcagaaaatccctgccagttgtgggttatagtacccatttatcaaatgaggaaagtttgtctcagagaggttacaaaactaggatcatacatttaaccagtggaataaacaaatgctcttaatcatgacaccatatttctgcttcatttgtaaaggaatatttatctcctttagtaaaataaatcagcatatagaatatcactaacttttagttctgagagagaaaccttctggtgggaagaggtgaatgtcaacagttctctactttcctcttggggttctctcatctgctttgtcctaagtgtacagtcctcaccctggcagcaagtcatactcgtgaatccctgtctttacaaaagaatttcctacccacaaaggggtgatttcttttttttttaaattaaaatatttgttattggccaggcacagtggcttatgcctgtaatcccagcactttgggaggccaaggtaggtggattacttgaggccaggagtcagagaccagcctggccaacatggcaaaactccatctctactaaaaatacaaaaaattagctgggcatgttggtgcatgcctgtaatcccagctacttgggaggctgaggcacgaaaattgcttgaactcacagggtggaggttgtagtgagctgagatcgtgccgtggcactccagcctgggcagcagagtgagacgctgtctttaaataataaataaaaataaaataatggttacaatggagacaacaatgtgtactggctgcctgtggaaagaggggagagaaactttgtcttccaatgaaaatggttcaatataacagaaaccccaatctgagtaccatatattatgtttataataacgttaaagacttttccttcacaaaagcagggaagccctataattctggtgcgatcctcctctctttatgtcagtgttttagtgggagcttttctctgtccacacatgcttaagtataaagtgatgcatcctggcataaatgaaagaaaaacagctgactggattcagctaacaggagagcacaaagagaagacaggccaggaggataaggtcttcttatcccctcagtaaatatggatattttattcccatattcctcctcactgtgtggtgtaatcatctctactccaagattcagcctgtctcctgctctgggaccaatcttgtcttcagtcggtagttggtaaaaagctttaactgaatactcctgttgctcttgcatcaaggtcttgagtccagctctgaccttgtgctctggcttcagcgaggcagcttttctcctgtttctaggaagaaatccttctccatgtgtgccccagttctagttgaaggttttccctcaacctgaccctagagtgactaacctggtttgtctaggactgtcttgagtttagcaccaaaagtcccatgtctcaggaaatgttgctgtcccatgcatccacaaatggttagttacactgcaagcccccattctgataatgtgcctggaatccccttagcactaggcacggcattcttattgtctcttgctatgtttgaaagctttgaataaattgtcaaatactctggctattgatgagggagttaataaattgaatttggaatgctggctacaagttcccctaaataatgtgattttgactatcaaaccacccacatcttttgagcacagattctaaatgattacaattttgattcataaaagagtttcattaatactagatatttcaggaaattatccttgactaatacgagggatggaaggaatgggggaaaactcaaggctcaccatatcatggtaaattatttatttattgtttatttagtgggaaaggatctgctctgttgtgtgctttcactggtctaaagggatttggcacagttacctaaataggtgtaattataaaccatatctccctttgctgttctccctgaatcactagccacctttcccagaactttgtttaaattcaagttttacatgatccttggagtgctgttatttgtaagtaaaaaatttaaataataataataagatgaaaatgaagattattgtaacagtgatttatctaacaagtaaagatggaacctgacatactattctaaattggattgagtttacttttgctataaaagaaatgtcagttttatctaatgacacttttaatttcttgcattgaatgcaggataataccctttaaaacaaaggggagacatttaagcataatgaggaactctcaagagcagattatggaaataaagcattgcttttatctattataggcagtctcagagagagaaacagacaaacctagtaaagactgttccagatagtttcggaaatcaagctaaatattgaataggcaaaacaaactttcacaaaattagcttacagcaaggcaagtctcctttaagaattttaaataaagagtaattcttgattgggtagaattctgtgtgctgtttacatgaactgtcacatggcaggaatcatttaaaaaaagaatacggcacctgttactaccagatgtgtggcttcctttgctacaggatgatgggtatatgttgcagaaatgctcatgtgtgatttggttcctgagaaacaagcatttttttgctctagaaatggtagtttatgatgctcctcttgaaggttctcatgtgagaactcttggccaccagagggaggtggtcaacaaagatgaagggcaacagggccctcacatgggtaggctgttggtgctgtgtggaatggagagagcctactttagaaagcccgttggcatttgggcctttatcacatcagagtgaatactggtacaagagacagcacagactgtcgggggagaatctcagctctgccacttaatagctaggcagttttaggcaaaccacttggcctctctgagccctgctgtcctcacttataatacctcattacgttaagtgaaataagccaagaacaaaacattaagcaccacatgttgtcactcatatgtggaagctaaatgattcatctaatcgaagaaaaaagtagagcagaggctagcaaaggctgggaagggtagggggaaaggagacatggggagagatttgttaaagcttacaaaattacagctagctaggaggaataagtttgtgttctctagcactgtaggatgactactgttaataatatacagtttcaaatagaagcaggatattgaatgtttccaatacaaagaaatgataagtatttgagttgatgaatatgctaattacccagatctcatcactatacattctatgtatcacaacatcactatataactcataaatatgtacaattatgtgtcagttaaattaaaaaaaaataaagaatacctttctcacaggtttgatttgagtatcaaatgagataatgtctgagaaagtaccttgtaaactcttaaatgctacacaaaggttaactattttcccataatgtggtttataattgcatgcgtttagatattccataagtcacaatgttaccttcaaaacccaaggcctgatatcagttattctgtgacacagatattagtcctctccccaggtataagcattataaaaggttagcactatattaagtaatggatctattgctctactaaattattcatgattatgtgttcagtgagtgattggttggattgaaataatcatcaggtgttctcagggctctggagaagaagctgataaatgacataaggtttcttcaatgtgatgactttgctaccattaaacattaagaaaaaccaattaattgaatcactgtgggaaaaaagtcatcaaattccaatctggagtgtcaaaggatctgttttttaagtaattattctttttaatacatcaaagcttttcagcaaaagtttcagaatcgtgaatgatttcaatgattttctgaagatcagtttttgagtaagaaagagaaaaattcatttcttttttttacagggaaagacatgttaattttttttaaatgaaagaatgaataggtttggttcattttgaccaggaattttagtagttgttgaaaaggtttgtgctgggaaataggtgcccccaccatctctgtcccagacttcgctggtgggctctgcaactgtggcagtaacaaaagaatgagaattccacttgggcagtctgctgtgatcttgacttgctcacatctaaattaaaccactttccatctccaccaccacagccctctgacatcctcatttttgtcagtagcccaacactcttcttatctttcatcctcaaattatttggagttgtgcttgtctttttagcttccaagcatttctttttttaaaacatttaatttattttaggtttgggggtacatgtgaatgtttgttacagaggtaaacaagtgtcatggggtttgttgtacatactatttcatcacccaggttttaagcccagtacccagtagttatattttctgcatctgtccctcctcccactctctcacctcaagtagcctctagtgtgtgttgttcccttctttgtgttcataaattcttatttagcttccacttataagtgagaacatgtggtatttggttttccattccttcatcagtttgcctaaggataatggcctccagctattgcatgttcccgcaaaaaacatgatctggttcttttttatggctgcataatattccatggtatatatggtactacatttcctttattcaatctgtcattgatggacatttagattgattccacatctttggtattatgaatagtgctgcaatgaaatttattatatgcatgtgtctttatagtagaatgatttatattcctctgggtgtatacccagtaatgggattgctggttagaatggtagttctgcttttagctctttgaggaattgccatactgcttcccacaatggttgaactaatttgcactcccaccaacagtgtataggtgttccctttcctctgcaagcttgccagcctgttgttttttgactttttattaatagccattctgaccggtatgagatggtatctcactgtggttttgattagtaattctctaatgatcggtgatattgagctttttttcatatccttgttggccacatttatgtcttcttttgagaagtgtctgttcatgtcctttgcccacttttcaatggggttttctcttataaatttgtttaagttccttatagatgtgggatattagacctttgtcagacactaaccttgaatagctaaataccccacttaaaagggacagagtggcaagctggatagaaaagcaagatccaatggtatgctgtcttcaagaaactcatctcatgtgtaatgacactcataggctcaaaataaagagatggaggaaaatctaccaagcaaatagaaaacagaaaaaagcaggagttgtaatcccaatttcaaacaaaacagatttcaaaccaacgaagaataaaaaaaggcaaagaagggcattacaaaatggtaaagggttcaattcaacaaaaagacctaacctaagtatatatacactcaacacaggaacacccagattcatgaagcaagttcttagagacccacagagacatagacttctgtgcaataatagtgaaaaacttcaacattttactgacagtattagagagttcatcaaggcagaaaattaacaaagatattcaagacctaaactcaacattggaccaaatggatattatagaccttcacagaactttccacctaaaacaatagaatatacattcttctcattgccaaatggcacatactctaaaatcaaccacataattggacataaaataatcctcaacaaatgtaaaggaactgaaataataccaaacacactctcagacaatagcacaataaaaatagaaagtcaagactttgaaaatcactcaaagccatccaattaaatggaaattaaacaacatgctcctgaatgacttttgggtaaatagtgaaattaaggcagaaattaagaagttctttgaaaataatgagaacaaacaacatactggaatctctgggacacagctaaggtagttttaagagggaaattcatagcactaaatgcccatgtcaaaaagatctcaaattaaaaacttaatttcacaactgcaagaattagagaaagaataaatccaccccaaagctagcagaagatgagaaataacaaaaatcagagctgaactgaagaaaatggagacatgagaaaccatgagtttatttatttattttttctttttgtttgtttttgagacagagtcttactgtgtcacccaggttggagtgcagtggtgcaatctctgctcactacaacctccgcctccctggttgaagtgatcctattgcctcagcctcccatgtagctggaattacaggtgcctgccaccacaagtggctaatttttgtatttttagtagagacagggttttaccatgttggctgggctgctctcaaactcctgacctcaagtgatttgcccaccttggcctccctaagtgctgggattacaggcatgagccatggcacctggcctggcttaggagttgcttttttgtttgtttgtttgtttgtttttgatggagtctcactctgtcatccgggctggagtgcagtggcgtgatctcggctcactgcaagctctgcctcctgggttcacgccattctcctgcctcagcctcctgagtagccaggactacaggtgcctgccaccatgtctggctaattttttgtatgtttttgtagaaacggggtttcaccgtgttagccagcatggtcttgatctcctgactttgtgatccatctgcctcagcctcccaaagtgctgggattacaggtgtgagccaccacacccagcaggagtcggttttgtgggaaaaaaattaataaaatagataggccactagctagagtaataaagaagataagaaaggagatccaaataagcataattggaaatgatgaagggaatattactgctgacccccacagatataaaagcaaccatcagaaactactgtgaacacctctacacacacaaactgcaaaacctagaagcagtggataaatttctggacaattacaccctcccaagactgatctaggaataaaatgattccctgaacagaccaaaagccagctctaaaattgaatctaataaatagcctaccaaccaaaaaaagcccaggacctgatggattcactgtcaaattctaccagatatataaagaaaagtaccaaccattcctacagtatttcttatatacaatgtgttcacaagtcctgacatttattttgctgaaaacatctctggttggactcttacacccccatgtcccctgacaccagctgaaccccagctttcatgcttgcagtgtcatggtggccctgactcctggaattcctccaattcctcctgaatccttctacagtgctgcttttattacaccattccttcttttataaatggcaatgactccctattgcatgctgtgtcaagccagctcctctcttggtgtatcctttttagtcatgtttgtttccccagatttgctgggatcctcctgcacacctggcttcaccagcttagctatctgccttttccccacatgatctctttgtctgaattacctggaattagcctttcgtcttcttttctttctttctctctcctttttttttttttttgatggagtcttgctctgttgcccaggctggagtgcagtggcacgatatcggctcactgcaacctctgcctcctgggttcaagcaattctcctgcctcagcctcctgagtagccgggattacaggcacacatcaccacgcctggcagcctttcttctgtaggaaattttggatgatccagcatcaaggaggtcaagaagctgctttgaaaattgagattcaccaactttaacttaaatttaggattctttaattaatcagtctggggctctcctatagtgtgaaaaataaagaacatccagtatggaagtacagtagactatttacattctggtgggaaaagtatccttcccaactttagcatctgcaggcctgaattgagcagtgacaagatagacactgagatgacattaataaagtcctgtcatcagtaacgatagcagagagatatcagtcaacaccccagatggtagaggaagatctggaaacacagtagaacttgagcttccacaagcatcagcagggggaggaagggtgtgggggaaaggaagataaaggtggagatgaatattctgctgcaggggccccaaagccagaaattattgattaaattggtagcttgatctgtgcccattcacctagtaaccatgggaaaataagttgggttaattttaaaataataatgcccagttcatagagacacttgaaaatgttaatgtatttttttggttaaaaatgatgagctatcagattaattcaaacagctgaatgttgtagtttgtattagttaataattgtattccttttcaagatcattaaataagtaactgcacgaaatgagataacatatgtaaatcacctagcacaatttctagtagctagcatagtccttaataagcaggagtacttttaccccttcctttctgtgaattcaatgatttaaagaaaattattcatgtaagtaaataaagtttaatgtctctctgtggatattttgcttcagttcatgtgaatcttaggagtcctaaagaagtagaagaaaagctatggggacagaaagaataagtgcagttgtttgttatacctgtctcaggtatacaaggtaggtgtgcaacatggaggcaggcaagtttcatatgaacatgttcagccccactttcagggccaccctatcactatataactggacacatttgcacaaatgtgtccctatttgaaaaagcaaatatgtggaaccctgaacttgctaagtaggcaaatgatgggtgattattctactacaaaagattctttgctctgaaagacacaaaatgagttaaattttttttttttgctacatgcatctgttgcttaaattctatctagatgaaaagtacattaatatacagctgactaaatctgcaaaaactaggaatttctcatgttgctattcttgtttatcttctggatttggaatttaaaaaaggcatgccatacttataattcttaaagaaacaaatcttaagaagttcactaactccatattggactgttatatatcattgggttcctattttcagcagatattctgcctatattttctgtattccatttactaaatatatcacttattcaagcaaatttcatattgtatcttgtttcttactatcctattcatgataaaattttgtataaactatcagtgaaaaaggattgttatttgaaaactttttctctctttctgtaaccaaattattacttattgcatgtcttttggagtgtaggtactagtactcttctttgtatcattttataaaatatatatgttaatgaatatatatgtgtatatatcatatatgagtatttatttggccatacattaaagattcaaagccatacattaaatattttatcaagtttaaataattgctctcataacctctaaaaagatatgtgtttgtctagcttaaaagtgacattttagaaacttgtttgaaaacttgcctttcgatgtcatgtaattctcagaaagatgaagtcttttaggactgaaatcccctcaagtttttattcttttgttatgtctagtttctaaacacctcttgaggattatggtagctgtagaaaatgtctaccagtgactttcatgtggggcttaatgtcagaatatataaccacttatcattggctgggctgaagtgtttttccagtgcttgttttaaaaggtgaatcagcagcagggatattcctaatccatctttatgtacacaccagaagagaagttgccaaggtttttatggctagtcagatgctttcaagaaagtacaagtggctttgattttcagtttttatttggttacaaagagagaaggaacatatttggtctcatggatggaaaatgctcctacaagaaaactccactgcattgatgcagcgtattcatgagttatctagaggctatttgtaattatgatgaaggattatggtaatatgagtgtgagtcagtacctcttaaaaatcatttatatgggccgggcgcggtggctcatgcctgtcatcccagcactttgggaggccaaggcgggtgcaatcacaaggtcaggagttagagaccagcctgaccaatagggtgaaacctggtctctactaaaaatacaaaaattagctgggtgtggtggcgtgcacctgtaattccagctactcaggaggctgaggcaggagaatcgcttgaacccaggaggtggaggttgcagtgagctgagattgcgccactgcactccagcctgggtgacagagcaagactccatctcaaaaaaaacaaaaaaaaaaaaaagcaaaaaaaaaaaatttatatgaaccaatcattttgagaaaacatctacaaaatgacggatttagtctaatactttggtgtctcccacatgtccaacttgtccaattcttgcatttgaatgtggaatttttttcttctctgcctattcatttttcaagatacaaaaatatgttctctcccctataggatcttcttggcaaccctagattatcctttccttttctgagtcctcagaacactctgtcatatcatcattagagcccttagcaggttgtcttgaaatctgttgctcacttgtctcccttattgctctgtgagcacctcaaggtgacactgtttcttctgtttcatctgagcccttgtacctagaacagtgtctggcacacagcaaatgaactaatgaaagagaggtcacacactgacagtctgcacaaaccgcccattatgtttaatgaactggtaactacatatttttggaagagttcataagttaattcagataacattcagataaatgtttcatccaaatgcccaggtttatcatagttgctaacacggagactctgcttgtcaccaagcctgtgatggcaaaaggccctctctcacagctttcaacacaccctccagccttatataaatgtctgtagtcaaaactattgactggatctgcctcctatcctccattacttgctatttcagaatgttatagaagaggaatgttgtggtgaaggaaaacaatttgaggaaggtggacattgagggcaagaaattagaaacaaattaattttttttttcaccagcctaaatatgatcctattttagggcctgggaaaaaaaggaggaactaacatttataaatgtttatctttaaaatgggattcaagtgtaactagttatggggcaaggtgagtaacaagccatgaaatctatccccgtgaaaactatttcctccaactctaagctgtaactttcaaattctcctaatttgagatctaggaagttttaatagaccaggaaatgatttgtccagttgctgttctcgcctaccaaccaggagtgtgttgacaagaacaaagagaaactttaaagctctcttgcccttcctggggccaggctgtggggagtgctgatgaatttaatttgatgatattatgccatgacattgtgtcaatatgcgatgatgtgttgtgatggcacagcgtcatcacgtggtgacgcaacatcatgacgtaagacgtcacaacgccagttaaagacgtgattccagaagggtttttaaactgagcaacaaatctacaattatttaactaaaagcttgagattttagaaaggcagctgaactataaattacaggttagaaaatgtttctttgcatgaattatggctctttttaaatttgtatatggctccttctagaaattgtaacctctgttcttgcaaggcagctttagaaatcaaaatataatttcatttaatagactgtttctatcacaagttttccctatattaggtttttttttttgtgggatatgagctggtgctaaatttaaacataatttcacaatgagatttagaaaatataatcttttaatttgcatatttgttaaaaattatttagtgcctcatagagtgccaggtaaaatgatttataattgaaattacattgtaactaatatcttttctgggcatacattttataacaataatcttgcactcagattttaataatagagatatgttaaaaaggagaaatgattttcaaatatgttttactttgtatatgtgtgaaatcttggaaaaacctttatatgttttgtgcctcagttctaccatctttaaaatgatgaggatgctttttttttcttgtttttatagggatattgtatggacaaactatatgatgtatgcaaatgttgtttggaacaaatgttgttatataaatctaggttactattaaataccttctccagagctacatagactctactcatgaacttgaaatccagtggggaaacatttgttagactagaaccaagatggatttgatgtttgattcttcatcttaacttttccctctgattgcttcatttctagatttacatgtttagaaatgagttatgctgaagtatataagacagtggcataaaaatatttttgatatttaaagttttggtaactctttctcttctgtaaacgtggatataaagctgtatgtttctcactggtgaaaggaactttacaatccacattagggtgaatataatttgagcaaaagttcaaattttttttttcactcatatgtagctttgtcagttcacaatccagagaatactggaaaagtctgaagtgtcacaaagctgcttcactacatttaattttctgtggtgaagtgaggagattgctttgttgttttaaaattcacttttgctttatcactccttctgcaactccagtaaaaatgtaccaaaatttcatgtctcctgaaagtgatacatgactttttgatggaatttgaaatggtggttgattacttttgaatacttaagctccaccggttgacagctcacatctacagaaaaacaattagcaaatttgtgaattatcattggtttacacattaaacaagcaaagtaattctttataacgttaaccaacaggctgtgtcttgattacaggatattgtttttcattaataaatggagctatttttagattttgccggtgtgtatacattttacttgcttgcttttcatatctcagtcaccattatgtgccagtctccaggaccacctgcataatctgtggggcccagtgttcaaaaattattgacacttttaagacattgacagtagatcattagctaagtgtacctcccttctgtgtacaggccctgggcagctgctcaggttgtgcacccatgcagacctgccaggcatgtcatgaatttggcagctttggatttaatgtgcttctacagtttatggcctgtttgtgtgatctcctgcttctttaaggttagttttggactacttacttacttttatctctttctaggtaatagtttacttataatattacttttatctctttctagataataattactttgtgttggctgggaatgatctatggccatttcttgcttatctgtactcaagaataatgtagagcaacatatcatcaaaaatttcctgaaataacttaaattaatgaaacctaatttaaacttggggaatgcctagttcaaaggaaagctgaattaaacaaaattttaataactttattattttcaagtgtgtgtagtattcagtaaggactgctagcaaggacttataactgttcagtcatacctgagctgagttaaagaatgggtcattgagaaattgggaagatttatttgtacagaaatcataagctatttatttttaatggtgtgtttttttgactttggttgtaaggtcaagcttcctcccagaatcttgtttaccctagcaattcacttcgcaaacttttttttttccccttagagatagcaaaccttgatcctattttcttctgcattgttacacatttgaaacagtagaatctgagctaatgagggctttggtgttttttccaccttgataagaagcatatgtgtgttatgtgagtgtgtgtgtgtgtatatataaatatttggggatgggtagcagattggacttcacaccatatcttgctgagaccgttagtaatgtgaataagtcttttgcaatcacctttcttttaggccatttgtagattatggatttattttctttcaggtttgcaagagacctcaaaattcattcagacaaagctcccactagtgacttaattccctatacaatattctactaattggttgttcagccttttgtccctctacccaacatgggagaactcacattctgataagtccataccatatatttctttattgtgccaagtcacaatctcctttatttgagcgtattaattctcatttgacctctttggatccttcagatgaagactattttcattccatagactacctaaaaaatatttaaagatagatgccatgtccttctttagttttcttttctgtagacgaaaaacatcatttaaaaaaatgttcccttcttctggtataagaaattgaatatccagtttgtctgtttctttaaggttcaacaccaaaatccatctgcagcatggaattaagttatctttggcaaggagagcaggcctataatctcacctctctgagaaaattttatttctattattacagaaatttcttgtttctattattgtacctaaaggtggtatagcttatgggtagtcataccatatggttggttcatattgaatttattgccaaccaaagtttctatgtttctgtctaggtagctgccaactattttttttttttagcattctgcacttgagaattattatttttgatcttatgattatctctgttaaattttgatttgttcaacttgacccatatctgtacactaccatatctattttggtttatacaacctatttattatcccactcagtgtttttgtcttaacatttttaggaccttgttttctatctaagccattgataatatttgagaacagaaagaggtccagaacagaatcctgtggctcaattctttttccaggttgaggttcttctcttattcactagccttttgggtacaaatgttcaacgagttactagttgcgctaacatccagtctacatttttccatcttttctgtttgggtatgttgttttctgttttctgtcagatgttttgctgtaatgcaatgcatattattgactgcattttataaccaaacagactaataaccccctcaaagaaagttatgaggttgatgtacataatatgatatattaagcagtttagtgggataaaataggtaccacaaataatttccaaagtcagtcattcacaggtagtaaagtcaactgtatttatttaaataagaataaggtctggatggatcccactaagtaattctcattttgggccctcattattttagttttgagttagttttttaatcagcagcgaggcacatcataacagtgaatagtaagaaatttcaggggagtactaaggaagaaatataaagttgtaggtcaatgttgaatgcctgttagaagtaattagatatacaagggtgaagctcttataaaattaatttacaaagcatatgtctatcttttgggtattaatattatcactgagatgggccaagtcagacttagaatcctgactcgtatttagtagtactgtaaacctataccagttaagaagtatctacctctcagagttactgtaaggattaaaagagaaattgtcatttaatgtcactagcatagtatatcaaatagtatgaacttaaaatgaatcctgttaattcagtaagtattaactgtatgctgttatgtgccagatattgggaattttttgtataataaccaagatgaaatgtatattcccccccccctttttttttttgagacagagtctcgctctgtcactcaggttagagtgtaatggtgtggtcttagctcactgcaacctctgcctcccaggttcaagtgattctcctgcctcagcctcctgagtagctggaactacaggcacccgccactacgcctagctaatttttgtatttttaggagagacggggtttctccatgttggtcaggctggtcttgaactcctgaccttgtgatccgcctgccacggcctcccaaagtgccgggattacaggcatgagccactgcatccagccccttctgttaaatgaaatacacatatatgtatataatcaatataagtaagtataaacacacacatatacacactgcattgaatctagcttgcatctcattaatgagtttatcatttctcaaccaaaagagttcaaaacttagactgagactggccacaatgccagatcaatggatttgttaggtcattccatagaaccaaggggtttcaaagatggggagaccttgtaaataacaaagtccattttgtctatatcatagattaggaaactgaagccaagagatgttgaatgatttcctaaaaccacttagtcagtgaattttagagctaaaaccatacattaaatatgtttcctaccatatcacactcaccaagtgcctaaaaaggagcatggaaccctcaagcttgtgatatggtgtcacaaatcacaaggtagaagatgccattttaacttggtctgctgatttgagtgtgcaaattagtaaaacttaaaaatacatattgatggtgagtatattttttgtacattggaaatattttgtagtaaataataaattagtcaaaatcagtcgccctttgtaggcatagttcatcaatattatgatgttaatattgttgaaatgactgagcacattcaaagacagaatctacaaactagcctatttggaaagggaattgcctatgtaagtcgtaacttgagggaagatcaaaggaatcagttcctaaacatgagaaactaagctttctttcattgaaaaagctagttagttgtattgaatcatatctaatgttggggtgagcgataaggagatagaggtgatgcctaaagagtaggaataaagtagtgaacattgctgtaatgttgatttgaaattctctttcacttagtgaaattcattgctcagggaaaagattctccttcaaggaaaggttgcttgcaaattcaaggtcattttctaaatcctacactgcttgtctatgtaccaaacttttctggttttatttttattctctttgtcttaaaatatatcttcaaacacaggttctacaattcctgctttgtgatgtgttattagtccccagcccatttgctggggccattgtaaacaaggggctattaaggtagacagctggacagggaacaactactgagaaggttgttgcctatgcatagaggggataaagagaaggggctaagagtatttctatttgagcaccaatatatattgaagagggtgcaagaggcagagagcttcagaggtcactgaactcagccccttctattttgcaaatgggaaatgaaggcccagagagagaaagtaatctgcccaacaccaaagagctaacacaaaattgggtttacaactcggataaattgatagcagactccaactgatttttttttcttatcaaaaattttcatgaaacattttaactatacagaaaaatacatcaagtcatataagaaacccatgtgtaactattccctttctccccaggtcacatcttaaccaattgctatattttctttagatatttgaagaaataaaatgggtaaagccccatgaatacacatccctgattccccttcttcctctttcctaagggctatgtatcattcttatgcatgcctttatgattttactacatgtgggcatgccacaaacaatattcagtattgttcagcatgttataaatactatataaatgttatcaaaatgtatgcattgttttataacctgcttttttttttttttttttttttttttgctcaacattatgtttttgagatttctctgtgttgatacatggaactccagtttattcattgtaactgtgagtagtatttctatgcacaaatatgtcacaatttgttaatttgtatttggataatttttcattgttggaaatggtgccataattaacaaaaagaatgtatatatagttgtttttgcactggtgtgagtttcttcagatctgagtttttctgctggtggatcatgaaaaggttacggtgagctgctcaggccaacacaaatagggtctggggcaagcctctggcagccttatccacttaacatggggtattgtacaaatgccatcattttctcttttgtttaaacttttattttaggttcagggtacgtgtgcaggttttttttttgccacgaagggaaaaggttgggaaacactgctgaagaagtggttctcaatcttaacatgtatcagaatcaactggagggcttattaaaaagactgttgagtttcactccctgaatttctgattctgtacacccagagtggggcccaggtgtttgcattttaacaaatcccaagtggggaccacctttcagagccactaaggcatctatctaggagttgacttgtgggttccaattgactattcaaatacattttcattattgcaaatattgtattataattagtatatcatataataaatctggaatataatttaaaaatagaaatgattgataggattcaaaaatctactagcttggaatttgcaagcttttgtgtgagagaaagatggagagcatttaattatgctcagaaataacttccctataattgcaaattctgtgttcctttttgagtgtgcaaaccaggacaaggactttaaaaagataattatatgagaaaagcagtcattccttcttttccctcttatctttatggtgtaatcaataggtctaccaccattcaccaaggaagaaaaagtaaaaagggaaatgttacaattagaacgtcatcggctctctgcaaaagttgcagagttatcagaatgtgtctttgatgcacaactcttttgggtcagtgtgtgtctattgaagttcactctcactcctgtgcctcccattgcatgcttcggcttctctggacacctctgccttcagaactttccttccccttccgtctccccttctcaaagggcatctgtttctctctccttgaaaagatgacactccatttataccttcagtaaaaagagaccaatgaaataaaatcttttgcaataaacaattcaggttggtagggagaattggtgctggaatggaccttcactcctacctctacctctaaaacacacttgaaatggattcgtacctggtgtgaagtagcatttcctccatggttccagtcttctgaatggtcttggtaccctccctgtccgaaaatgagggctccttatcagctcctgctgttcacacatcccccacgcacagtcagtccctgttgacttgaaactgttcaccttcatctaccctgtctctgcttctgtccagatcactgcacttctcatctgggtgattgcaatggccttctaaatgtgctccattcttgttcccttccagtccattcttcacatagtggccagactgacctttaaaaaataagagctaaatatgccattctactgctaaaaatccttcctaagtggcatctcattgtcctcaaagttaaatccatatctttcagccctacctgacctggcccttgcctgtctccagcatcactttatgtggcacccaccttgtgctgctttccaccacgcacaccagactcccccacttcttctttctcctaaggcattggattctcctctatcaagcacaagcccttctctttccttgagaagttctttcctccctcactgctttgctcttctccttgataacctgtacccgtccttcaagtggagcttaagcatcacttccatggggctgtcttctgtgaccatcgtccctccaccatgctggcctggctttgctcccatgttaagaacagctctacatcttccctccttctcatggctctcctaatacttctaagtatttattgtttggtttccctactaggctataagcttaatgaggatgggaatccttgcccatttattcttagcactgaatccccaagacctaagattgtgcctaggagccatttaataattgcaataaatatttgtggctggttgatataaattattgactgcatttccacatatggattgcacacacatatgtatgtgtttgaatttctcaacatcatttacttgtaaacctgcgtcagtgtgcatggtttacaaactcaacacgaataaactggagatcaaatttgtatgactttcttttatgttgtttaacataaagccacccagtttgtcactgaagaatatacagaaatatttcattagtaaatccttccatatatattatcattcttgccagtaatgttgctcctctgtgtgtgtgtgtatgtgtatgtttaacagagagagagatgatttttctagacctactaaaattatgatggaagatatttacagtgtgcaagatgagatttgaacatggaatctacctatcagtcagcaggcttaaaaaagaagattcaacactccagtcatgaagtgtcttttaaagaatataatttgaaactctatgggagaataagaatataatggcgagcctctagttcctagggctagagtaaataaattcccaagtctataggtttatttgaagcaaatctaatacgtgaaaacttaggggcttttatccataagccattcaagaacaaaatccaggagtctggaactatagcatccaactagttttttattttagaagtatgatttatctaaaaattcataaaatataaaatatacatgattagtctaaaatcatgaaactcttaattataatatcatacattaaatagtttatgaagcattttcacaaggtgaaatccaaactagtctaacttcagataccaacctttgaccttggatggactctaggtttaaaaccagctctgctttatattagctgtgtgacttggcaagttatttaaacttccacatcttactttctgcatctggaagaagggcatagtatatatcttatccaactgctgagagattaaatgacgtgaattcttctcaatactgccatggcctcttgaatggctttgcagtttctataaactgtactcaccacaatggccaaaggtaagcctttaaaaatctgccagaccaccttattcctctgtttaaaatctttcagtggcttctcattttggtcagagtaaagcccaccagggcctctgcaatctggtctccataacctctctgatctcacctcctattctctctgcttcatctgtcccagctatcccaatctccctgccattgcctggacacaccaggaatgctcctgccatgggcttgggggttcatgctctcattgaaatctttgtttagatggcacctttgcaaagaggcctgctgaatatcctttacacaactgtagttctttcccctccccttcccgcttaccattttctgtgtgttccttttttcatcacttactatttgctctatttttattgttcatttccctcaattagaatgtaagcttcccaagggcaggaatcattgtttgttcactgttatatttcagacacctagaacagtgccttgcaaatagcattcaatagatgtttgttgagcaaatgaattttaaagtaacttagtaaagcacctagctatatattggttatcactacatattgaaaaaaatgttggacagttttattgtttatttaatcaaaggaagatattttgcattgcttttttattttttattttttgaaacagggtctcattttgtcacccaggctatgtgtagtggtgtgatcactgctcactacagccttaacctcaacctctggttctcatgtgattctcctacctcagctgctccagtagctggcactataggtatgaatcaccatgcctggctaagtgtttctgttttttgtagagatgagatttcactatgttgttcaggctggtctcagactcctgggctcaatctgatactcctgcctcagcctcctaaagtgctggattataggcatgagccactgcatctggactgcattgctttttaaaagtgtagaatggcaaggggaaaaaaaggagaaggggaaaaagaaagggggaagaagagagaagaggaaagagagaaatgtaaacatgaaagaaggtagaaggaacagagattaggagaagttagaaaaaaaaaacttaaaactctttggcctcctttcctgcttattcactaacccctcaatttagagtgaaagttgtaacaagagcagtttaatatgctgtatatcagggtgagcagtttttttctgtaaggggtcaaatggtcaatattttaggctttgtgggccatatggtttctgtatcaactactcaactatgtcactgtggcttaaaagcagccatgggtaatatgttatcagatgggtgtggctgttttccaataaactttttaaaaaaaatttttaacagcaaaaacaggttgcgtaggctgtagtttgctgacccctggcccaatgtatattgttgctaaatgttcagtgtagactacaatgtagggattaaattagagaaaatcaaatgccttcgtcaagacctattcatgatgaaatcgcacaccaaactaggaatgcaaggggccttccttaacctgataaatagtattatagttagcgaaaaatgacagcaaacataaatagtaaaggtgaaaattttagaatatgtcttttaaagagagtaagacaggaacgttgctatttctttttccatttatcatgatattgttagtcctgggtaatacaatagggcaagaaagagaaatgtttataaggaagaagaaagaagaaagtaaatttgttcatactcagagtatatcattatttaaaagaaaattcaagataattcataaattttcaaggccgttagatataaaatcaatatgcaaattaatattcttttaataataaaagctaacatttgcatttaattactatgtgccaggcactaggcatgtgttaacttatttatctctcaccagcagtaactttattaggtagcactattattcccatttgaaatttgagaaaactgaggcacagcgagataaagagcttgcccacagtgacatttgctagtaagtaactctgtcttctgtaccagaactagctcattaaaaatgtaacagaaaaaatgattttcttttttttttattttttattttttttgagacagagtctcgctctgttgcccaggctggagtgcagtggtgcgacctcggctcactgcaagctccgcctcccgggttcacgccattctcctgcctcagccttctgagtagctgggactacaggcgcccaccaccacgcctggctaatttttttgtatttttagtagagacggggtttcaccgtgttagccaggatggtctcgatctcctgacctcatgatccgcccacctgaaaaaatgcttttcataacatcaactaaaactatatgttacttaggaaaaaatagaaaatataaacgttattgagagaaaagtctgaaatgattagagagataatactatgcttatttagatatgtgggatgtttctgtattgaaaagctgtctagtcacaatcaattaaaacattttgtgaaattccaattaaatatcaactggttgtggtgtgtatgtgtgagagatttgacagattctataattcatatggaaatataaaattgaaagagtagccagacaattgtgaaacccaagcaaacaggcaaaaaacaaagacttgcctatatattgatttgtaaaaaagcttcagtacatgacatggggctttggagttagcacagggatagacaaatagagagaacagaagaggtagcttgagaagttatgcacgtgtgggatctgggtatatggtggaggtgggattgccaattagtgaagaaagaatggaatctatttttttgttgtggttgatgaaaatataattaagtctctacaccatttaaaaaaataaattgaagatggattagagaccaaatgcaaaaaaaggagactttatgactgtatgtagaatacagttacaggatagataggtagatatagatacaaaaggatatttttatgatatcaggtaaggaaaaaataacggattagactgcctggagttaggcatctcttgaatgactgaagaccgaaaacaaaggtaaagctagaccacatcctggtggaagatattgggatatatgatagatcaaagactcctacaaattactgaaaaaaaaaaaactccagataatgaaatagaaaacaggggcaaagaatatgaatatgccacactatttatacattatttaataaaacagaaaataaaattcttccctgacagtatgttcaaagttgataagtgcaatggaacaaattaatccacagtgatagactttgaagtcatgcatttgagttgataaaagatttcaggaaataaaaacctaaaataatactctataatatttataggcacatataaatatggtaaaatatgaaaatgtcactgaatatgaaccacattcatgacatagtggctgtttctgaggagaaacagagagggaaatgggatttgggagtataaattcatttgcaacttttttaaaataaaaaaatctgaagcaaatatgacaaaatgtcatttttaaattttgggtggtggatatgtaggttttgctatattttcctttgtactttttttgtgtactaaagaaaaagattgaagaaaataatacacttaaagcacttagcatgttgttgcctgacccactggaagtggtcagtgtatgttagccgttgctgctataattgctgttatgtcccatttaattacctccctgcaaaatcattatattgccctcagcctgcctgacaccatccctggctggacagtccctctaaattagctctgctttcctgcttgacatggagggatttgaagtttcaagccaaactttggtacttaaattccttggtgattgattttttttttagctaaacggtagttcaaaagagtacctactgagaaacattgtatgcataatttaggtagattgctagtaacagatttattttaattaattttaatatctaaattgtgccagaacttttaaatagactcaatttcatgtcccatgtggaaaagtagatgcatctttctaatcttggttactctagggcaaggtgtgttagccacccagattgatcttccttgtctgtaggcaggtggagtagggagagtgggctgtccacctgatggtggggaacaggaaatctccagcccttgagcttggttctgcttcagagagagggtgtgtgtctgtgcccatgatttctgaagagagttaattattctgggaacagtagcttcctctcagataccctcctgtgcagctgctgttggcagtatctggtgagctctgagcttcccctccacaggtgcccccacttcatcagagagccagctcagtgctgctgggggaaccccttcctctgttcacctctcccttctgagcaagggattaagcaagacttgagaaaattaggtcctaagaagaggttttaaaaatatgtaacttgtgtgaaaagggtaaaacaaatcaagtttgtctttggtattctccagctccccctttaggactcctgtccccctaatctctagaaacctcttggtcattgttctttcagaagtccattgccttaccatgcccttggctacccagcatctcctgcaggtgactccagagccacctatccgcaaagggttttttattttttattttattttttttattatactttaagttttagggtacatgtgcacaacgtgcaggtttgttacatatgtatacatgtgccatgttggtgtgctgcacccattaactcatcatttaacattaggtatatctcctaatgctatccctccccgctccccacaccctacaacaggccccgtgtgtgatgttccccttcctgaatccatgtgttctcattgttcagttcccacctatgagtgagaacatgtggtgtttggttttttgttcttgtgatagtttgctgagaatgatggtttccagcttcatccatgtccctacaaaggacatgaactcatccttttttatggctgcatagtattccatagtgtatatgtgccacattttcttaatccagtctatcattgttggacatttggctaggttccaagtctttgctattgtgaatagtgccacaataaacatacatgtgcatgtgtctttagagcagcatgatttataatcctttgggtatatacccagtaatgggattgctgggttaaatggtatttctagttctagatccctgaggaatcaccacactgacttccacaatggttgaactagtttacagtcccaccaacagtgtaaaagtgttcctatttctccacatcctctccagcacctgttgtttcctgactttttaatgatcgccattccaactggtgtgagatggtatctcattgtggttttgatttgcatttatctgatggccagtgatgattgagccttttttcatgtgtcttttggctacataaatgtcttcttttgagaagtgtctgttcatatccttcacccattttttgatggggttgtttgtttttttcttgtaaatttgtttgagttctttgtagattctggatattagccctttgtcagatgagtagattgcaaaaagtttctcccattctgtaggttgcctgttcactctgatggtggtttcttttgctgtgcagaagtgctttagtttaattagatctcatttgtcaattttggcttttgttgccattgcttttggtgttttagacatgaagtccttgcccatgcctatgtcctgaatggaattgcctaggttttcttctagggtttttatggttttaggtgtaacatttaagtcttttatccatcttgaattaatttttgtataaggtgtaaggaagggatccagtttcagctttctacatatggctagccagttttcccagcaccatttgttaaatagggaattgtttccccatttcttgtttttgtcaggtttgtcaatctgcaaagggttttatctttaaaattctttttccgtttcttcctaaaaccttatcaccgattgcacctccccacttcatcttaatcaaaaccatgacccctctgtgccttggcacctgccatttctttgctcttctgtctagatatataacccatttcctttctctctggtgctctacttggcccagttcaaatgccaacctgttgcaatcctgttacttaccctgcagacaggtattttcccctgtctctgctctggaggccctttgaactctaaagtattcccctggcagactgaaaatggaatctttgaggctgaggctctcaaagttaaaacagaaccaggtggtcctagctgggggaaggaatggtaattgtgttctcagaaagatgtaaaagtatcacaggacctctctttctacaatcaagctaaaccagttcctattgttagtgccaagatgaacggaggcccaatcccccctcctctcaccagaaagaaacatcagccaagactcctggttttgggtttggaaaccaaacagagctcaatcagagctcaaccaatcagagctccctcgactcgactggatgaaacagggctcagctgtatcaaccaagcagggctaagctgtattgatcaatcaaaactcagctgtgccagccaaccagcactaagctagtttccatcgttcatttgcataaaccaacctgactggaaacctgggtaggaggttttgctataaaacagaacactctcattgttctccggaacatagcttcattttacacagcaggctgtgtctctctgatttccaaactgttcactggaataaagtctgtttcctccatattcctgtagagaacttttgttcatagaacataatctctgtcagcatatctcatacattgtactataattgcctgttggtacatttgtcttcctcttaaatggtagagaatacattttgttaatttgtgtttccccaaatagcatagcgtctgatcattggctctaaatgaatgaattaattaatgagtgaatggaaacttctattttataagtacaaggaagacactgataaattttgagttgaggtgatgatgatttgtgggagcccatatgtcatatatttcagccttccctgcctaaacgttaccctgcaccggcattgtaaaggaagtaaaatggaacacctcagcctcctctctcctacagatgcaaacctgccctgaaacctgctgatcccagtccactgtctatgccccattttgttcccctgcttttgggactggcccttgattcagagaacttaagaagagcctcactgcaactttatgctctgggtaatttaccccctccttgcctgaccacagacatgctaattactatcatttaaaggaactactttcatttattattaatcactataaaactctaattcaatgcgtttgccattatttatttctcaaacatgaattgaacacctgctatcaaccactatgctacatattggagatgcaaggattggacttacatgtcagattagttatatctttttgctttaaatccagcacatttttctattcatgtactgtttgtttttcccattctcttcctcatgtagcatattagacagctcgtagctttaagaaagaggcattttgattccccatccaaaggaaagaaggtaggcttgaaaggtgagaagcagaatgagtttgtgtggtaacttgggaccaaactcccaacaccaggtttgatcttcccattccggggttagtaaactgggccttgctttggacaagcctcagtggggccatcactgtccttatttacattattaatttgggtagccagtctcttttttttttttttcacaaggaatacagaagtaacttgcaggacagttatcttttatgtagctataattcttcagtcagtggggtttggctacactggttttactcttgtagagcatgaaatatttgtccttgagagaaaatgagatgattctgtagtttcacatcggtaactgaataggaaacgtggttcattcagtggaaatttggatgggcatttgtggcatctgagtgtaaagtccttgctgggcactgtccacagtgatggaggtcttccagtgtggtggccatgagaatgtgcctctcaggtattggaatgtaataaactgacaaacccaacagctctgctctgaaacccatcaccaatgctgcccgtgaactgttcttggttgctgactcagcatggcagggagactaaagcagcccattcctggagatacaggactcctctatagtcttgcaaaacttgccttagacctggactatagtatccctcctcccccacccatctccccttcttccctcctcccctccctcctcccccacccatctccccttcttccctcctccccaccctcctcaccctcccctccctcctcaccctcccctccctcctcaccctcccctcccttccccttcccctttcccctccataccccttccccatcccctcccctcccttccccttccccctcccttccccttcaccttccccctcaccttccccctcgccttccccctcccttccccctcgccttccccctcccttccccgtccccttcctctcccttccccttcttctcccttccacttccccttcccactcccatctcttgcccttccccttcccctctcttacccttctccttcccctctcttgtccttccccttcccctctcttgctcttccccttcccctctcttgcccttccccttcccctctcttgcccttccccttcccctctcttgcccttccccttccccttctccttccccttccccttctcactcaagagcagaccagaccagcattgtggactcacagttttcccaccctccacaggctccctcctcatttcctccccaaggagtttcccccaaataaattagtctgctgggactaccacaacaaataccacagactcagtggcttaaggaacagaaattcgttttcccaaaattctggatgttaaaagcctgagatcaaggcgttggcagggttgcttttttctgaggcctccctctctggcttttagatggttcttttctccctgtgtcttcggttggtcttctctctgtgtctgtgtcccaatttcctgttcttataagaacaccagtcctattggactgggcccgtcataatgactgcattttaacttattagtcctttaacctttctaaagaccttgtcactaaatacagccacattctgagctactggaggttggaacttcaacatatgaatgtttagtgcatcccataacacctactaaactactttcatgtttaatcctgtattaacctttactttttagaggaagtgggccaatatacccagcctccataatgggtccctctgatttcagattgcagtgcactaagtttgctaagcctcagagacaactgtggggtgagggctctctttgacctcctacctattttggaggtttcccaaagtctttagctttaactttgtctttcaggcatttcactttatatgttataataagtttggctatggttaccatgattaaatgaattcactatccactgtcattatttctagttgttagttggtcaaatacagccattgttctattaggttcaaaccaagaagataaagaaatacctaccactccattttagcagataatataaagttttgtatgtcattcactggtggagattttatttttccatttttacaatggattatttttattaaagttttataggtagctttctgtcttctgaattttttattttctctttcttttaactgacaagaatatacttgtaggtaaataaatttaaaaaataatctttttaagttctttatgtgagttcactcgaagcttattataatgtaatgagcacactaatatgaaataaacagttctttagatcttaaatatcttgtgtgtcagagaaaacaatttttctgcctggactggaatgtcctttcaccaaatttatatgctatattttctttaagggtaagttcaaagctcattttcttcatgttgttttcttactttggcccatcctctcctctcgtatttttctataaatcatgtgtactgtaactttcttacgtattgtcttatatttttcttcagtggcttcaggtatgtgtacaaactctggtctccacagctagattatcaatttccaggcatatcttgctatgttatttagatgctaagggaaaaacaaaaggagtataagctatgattcctgtcaacgtctcctttaatgttggaaattgtgagcagcaaattttgaggctcaactgacagaaaacaacattcagtatgcaaatcaagtgcaatttataataaaaattagtggtagatatgtatactgccatacgaattaatagtcaaaaatgatacatgtatttcatatgtaactgtaattggcatttcttttacatagtcaaaccatgttttcactttttcttcattaattctgaggtacatattaaaagcatccaagttggcagttttttcctgacactatatatagtgtaactaaacacacacacacacacacacacacacacacacggatgcgcatgcacgtgcatgcacatgtctggaattcagcatctgactagctatgactccttgtgatcctgtgttctgcagggctgagatatctccgctattgtttgtggttctgcaggcttctcctttaacctctttgtcctctaatttaaaaggtcctagtagcccccactccttgctccctctatcctcctttgaaattgtgagacagcaaaactttggggtttgcagcctgggctgatggatgcagcaggatggtaatactttgagagaaaggaagcagatgagtgtccagaatgccaggtaagttgtggcataaagtgggggcaagaacagagcaagagggaccagcatgtcacagtctttggtcagggaggaaagaagtgaggttgggggagggagaggctcagacaggtgagagacctgggctcttccttggtgacagtagcttggaaaattcccccaagtcttctgggcttggagcaagtcctgggaggcaaattggggataccagaagccttgtgtatgcacccaagcaagggtttgttctctggaatccatagacatggcttcagcctcagagatccatgagttcctgaaatatttttgatagggttgtatatttttttcctagtgagaagatctatacccttagcaaagggatctatgattcaaacattggttaaaaaccatttcaccatcatgtaaaatgattttcttaaatcagttttttgagctgattatgtgggaggaagtgtggggttgagcaaaggcactgagagaagctgaggggtaagcaatattctgtctctctggctcttatccttctgtttgtctattttaaattaaaagcaggagaaaattaaaaggaaaggtaaatgtgggtcattaaatagaaccaggagcaagattaagatgactataaaacctgtttacttgcttaggataggtcataaatttagctctaaccaaaaagaaaaacctggttagttgaaaatgccgtaggatccagaagaaaagacagaacaattgctctgggaaaagtctgtccttagtactaaaaccagacagggctctctccccagaatcataatgaagggcactctgtgcggcgtaacaagcagtgtccttacaatctcctagccatggacccatggtcaaaccccacatttggctctatgattgaccaaaccaaatggcaactttcaaagtagcaactcaatacaagcaatcctattagggccaatactatggggatcccagggtggggatctgctgctcttccttgcaaaatgggcattaaagttttgagtatttgggcaatatataggtgctccaggcaggccatcaaatacaaaggattccttccacctagttgaggatacagattgggtagccatgagtttgcattaaaattgtggattctgtgttaacagtcatcttccttaacaataatgctggagaaagggttgcagttttcttgcaggaaaactgaagagtttttgttaggatatgcgactgaacagaaagataccccacttccattaagaagggtacaagggagatttactagttgtatcataagcagattccttagctcctctatacctcagtttttttttaatatggtgtaggtataagaattagaactgcacttataccaattgagtgaaataaagtgtagaacactggacaactgatagttatgacttgttaattattcacaagaaagccaactggaattagcttaacaaatatactggtccaaatctcaaagggcttcataatctttgaggcgagtgaaacgcaataatactgataaatatagagcaagccagtagttggtaattaaaagcccaaatgttgggggcaagtaacagcggaagtcagaagagagaaatacctgtcatattgtcagggaatgcttggtggaagtcgtgacatgtggaattagaagagggagaggctcaagaggagaacagagtgaaaaaagccatctgagagggaagcagtatggggatgggagcctgtgtggctcctctacgggaagaattaactaacattttttaataggtccctctaggcatgatgaaatctgtggggattaagaaacatcacagattccaattatgtcaaagggcagcttgtaagttgccacaccattgactgatttctcacactatgtggagtctgatgctcatcactgtgctgaaggtggaagatagagaggaagctgcccctgccttttgaggagctcagtatttagttagagagataagctgagaaacaagtaatagccttgtggagagtggaattgggaagagactactgtggctgggcgctccaagtggctgaagcggatgtgggagagcagtcagttgaagtccagccaagtatccaaccaatccaaccagccagtcaatcaatcacttggttaatttatgcaaactacacaggcctgagtaaatgtttcacgaaatcgactggttgcttgagtgaatcaacctaatcaagggtttgctggcaccgtatagacacagccttaacaaggcaaatatcattgtaatctcttgcctttgaaatgattctatggtgttttccaggggatctgggctagtgatcttgtcatgttttgacattctgccccacagtgggaaaagaattgttttttatggagtatcattcgttgtctaaaatacagctctgcaaatattttcaaatatttccaacattggcattatttcagtgatacaaagatgtatttgaaatctctttttgaaggctgaagttctttttctggctatttactggcaaccaatctaaactgagctgctttcgtttatgaccatgctcactttcctagcttttaaaaatatttgcttttaaagctctgcagatattttttttcatgcccaccccaaccaatcacttttgaaatggcttgagtgaaagttcagagttttatgagatttcctacagtagtgctatttttagggaggaaagaatgatatttagttcttttcttttccaaaaaaccaattttgtctccatgatctactctacagcaatgttcagagttatttgagggataaagtgagtacaattttgcttttatcccctggagcttgtactagtgaaaacactgaatttgtgtaaggtcagggatgtacctctgtgacatagattgtataaccaattttgtaatctgactctgcagcctcctagtctgaacttgagtcaacaacaagcacaaagataaactttgccatttaggtctggatatgaagagggaaaagggaaggaacagggggaataaggttagtatagcagagcaactgttggttttttgtgcagtggattagctgctttacctcttaagtttattttggggcagtgtacctgtagtacagataatgaggtctgtaatatgggcttttatcttactgtctgtagtcatttgatctgctcaagggtcataaactcaaatgcctatagtggttgttacaagctatataaacatatcataacaggccagctgtgacacaatagggaatagtattgccaatggcaaactggagactgtccatgcatttgtgtaagacaattaaggcttttctgcaggctgaatttggctgcttagcatggttggtttgcaactcctaaattaaagtacatgaaaagaaaatgtatttatatgtaactggtagagatgtaccaattaattatgcagtgatatcactgtgtagtttgtcttgcatttccttccccaatttgataaacaggataaagaaacagtggatggaggcattccatcttagagattcagaattttcattctttcagaaaactattccattagagaatgacaatgaatcttcccagctttaactcttgtggtatgtcttttagacaccataatttgtgatgcacagttagtgcttatggggaaataattgaatagattaaaagcaatgtgtttacacatgtgattttagctttcattattaatggagtctattctttttatgtgtccagaatttatatgagggtgattgttctctatatctcttaaaacataggagttgtggtttaatacttaggaaagtcccttctatctaaaggtttgtgggagaagtgtatatagtgttctgcataatcaatagaaagccatgatgaggtacatgagatttggagaaagaacccagctttccaggtttgaattctggttctaacatacatgatttctataactttgagcaaactacttaaccttttaaatcttcagttttctcatctgtaaaataaaatttttgtaaggtttaaatgaagtggtacaggtaaaatgagctgatcagttcatggtacataggtgctcaataaatgtttagatatttctactacttacaattataattaatattattactagagatataggtgtcctaatctgacataggggccatagagattatttggagtaagtctcaagaataatgtaaggcttgtaatatggaacattgggaaaaacttaaaaaaaaattaaaagctgaagatttttaggctggagaaatgaagccaaagaaagagaatattgctattcaatctgattaaagcatatgttacgtaggtctatagatcaaaagaattagaagttaacacagaagaagatttttataatttttaagtggaggaaacattgtaaattgagttaaaaaaataaagcaacagaccaggagacaaaaataacatctgaaaaaattcttgtcactatgctcaagaaaatattattaaaacaagataccatgttagaaaaaaaaaaaaaaggaaacgaaaggcctcagggtagtttctggagatccactgattaaggatatctagaatggcctttgggagaagttttagatagaagcctttctctctagattgtacagcaaaagatgcttttcaattcagcatttagtagaaataacaacaacaaaaaagcaaaaataaaatttaaaaatagaaaacttttatccttcttatcttatagaaaaaaaccacaagctgttagtcatcccctcttgtacccaaatctggaagagatccatactggggagagttggagttctgcaaagggaatggatgatttgagggctatgtggtctttttatattttcttaaatttcccctgttcatgcatagttaaagatttgggctatttatctctggtgggaattaagattgctattgattttttaagtaccccaaattgagacagtaaatgaacctttacaaagtacagggcttcaattttctataaggagcagagcattgctagaaagatggttggaatagtcttctttggtggtagactgcacaatttgagtgtcccaggagtgtgacctgatgggggtgtggacggatgggcaaaaagagctcactcctctgaaatgctgctagaggccagtcacccaaccagtgaaagtgagttgaatgtgacagtgtcctggagcaggagtcctgagggaaatagcaatgcacagttacaggaaacgctaaagtagaaagtgtgagagctgttggagcatgtctgtgaggattaagttcctgggatgagcacagtggtgtcactgggcctcacaaagagaacaaactgtagctttgaaaagtgctgaaccatgaaatatattttagatttaaatttggaataacaggaatagtaaaagaataggttcaccacttggacatgatggtgtgataggatagatatggagaaaagaaagaccaattcacatcttcatttacttctatttttttctttctagaagagctaataatcttcaaattgggacagggaggacaagacatatgaatatgaacaactaattaattcctaaggtagatgaggagaaaatagaaggtctaggcactgtcactgccccagacacagatgtagaacttcttaggtattaaagaatgtgaagatttggccctggaaatggtggagttctgcaggcacttatggagcttaagaagaatctgaagatggagaggtattgagattttcaacaaaggtacaaagatttttggaagttcagaacaacagtattgatgttaggatagtttttagtgctttagcagataactcgatgatttttttatgaagaaaataagtgaactctatacatatattgcactaacataaacatacctttgagaataaggtgatcttattaatttgttgatgtactgtatttttatttcaacagagtatttcttaaaagctttagagtttgtaacagagagatacaataaaaatgtgaactgcatgagggcaccattagatggatttaggtggatttgcagtgggaggagcagccatgttcaaaaagggccaatccagatggaggtctctagaacatttcagggctcttggttggctccattctcttcaggtaattgaaaataaataatttaaaaaaatagtataaatagggacatagagaaatatgtttgtcaaatttgcagataatgacaaataatatgataccaacatttttaaagcctctagatactgaaacaaggggaaaaaaacaaaaggaagaaatgtagtggagctaaatttaagattcagcatttatatttcaggaagtgacttgaaccaatacaggatgtggaggtctgatttgacagtaatctacataaagaaaacctggggtttgtgttgaccacacagttggcttgatgtgaaccaactgtgtggttcctctgctgaagaaattaatcctatataacaaatgccccaaacctaatgcaagtgcaacctgcattaacagaagaggattgtccagctcttaggaagttatagtccagctgctcttcactggtagaccacatcttaaaagtaatattaattcttcagagagggtcagccaagatggtcagtgggtctggaaaccatgtaacattagaagcctggtgaaaaagaggagtcggggacatcctttctatccaagaacatttaaaagggatgtcatgtaggaaaaaaagtagttttcctgttgttaagttggccgaaataggttaaatagatgcacattttagctaaatggacacgagattctttttattttgaactaccagtactattcagcatgttatgggtttcattaggatgtagttaattccctggtttagaagtgttccaaatagaattcatttaacagatctttaatgagtactattatgtgtcagacactgttctaggtgctgaggatagactgagatggtgaagattaataaaagaatgagttgagataaacagagagtaaactgatacatatcaacggtattcccccgttagtcctagaattggggctttggctcaaagttgaggaccagaaaattaagtgcccctttttctaagttgaaggtgctactggcccctggaatagctctcttgaagtatttattgagaggcactgggtaagaaccaaccttaccactaagcccacctgcaccagtcagtataagaagactgggaggggtgaaccttctggggagtgctttttcagagctgagctatcccctttcctcccatgagggagaagacctcaggtgttagagcagctccacttgtaggcatctggggagtggccaaggtgcaggagctggaccaatgtgtaggagtaggagtttgaagcactcaacttgaggaaaggcaaaagaatcatcgccaccccctggaagggtagcagagagggtgctgccttcagaaaaccccactcctcacctgggcagatttcttggtcaagactatactgactcagcataaaaccttgaacaccttttattcgccaggcacataaaaagaatcttttgagtgttgataatggggtaggttgtgtgtttgttgtatggtgaggttgggggacagaggacatataagaactctgtactttttgatcaattgtgctgtaaaactaaaactctaaaaaataaagtctattaaaaatggaactttatctaacaaggaggctccccatctctcagcctggcaaattgggtaaagagtcaagacccactggtgtgctgtattcaggagacccatctcaaatgcaaagacaaacataggctcaaaataaagggatggaggaagatctaccaagcaaatggaaagaaaaaaaaaagcagaggttgcaatcctggtctctgataaaacagactttaaaccaacaaagatcaaaagaggcaaagaagggcattaaataatggtaaagggatccattcaacaagaagagctaactatcctaaatatatatgcacccaatacaggagcacccagattcataaagcaagttcttagagacctacaaagagacttagactcccacacaataataatgggagactttaacacaccactgtcaatattagacagatcaatgagacagaaaattaacaaggatatccaggacttgaactcagctctgcgccaagcagacctaatagacatctacagatctctccacctcaaatcaacagaatatacattctcagcaccacattgcacttattctaaaattgaccacataattggaagtaaaacactcctcagcaaatgcaaaagaagagaaatcataacaaactgtctgtccgaccgcagttcaatcaaattagaactcaggattaagaaactcactcaaaaccacacagatacatggaaactgaacaatctgctcctgaataactactgggtaaataatgaaatgaagacagaaataaagatgttctttgaaaccaatgagaacaaagacacaacgtaccagaatctctgggacacatttaaagcagtgtgtagagggaaatttatagcactaaatgcccacaaaagaaagcaggaaagatctaaaattgacaccctaacatcacaattaaaagaactagagaagcaagagcaaacaaattcaaaagctagcagaagacaagaaataactaagatcagagcagaactgaaaggagatagagacacacaaaaaaaacccttcaaaaaatcaatgaatccaggaggtgggtttttgaaaagatcaacaaaattgatagactgctagcaagactaataagaaaagaaagaaggatcaaatagatgcaataaaaaatgataaaaggggatatcaccaccaatcccacagaaatacaaactatcatcagagaatactataaacacctctatgcaaataaactagaaaatctagaagaaatcgataaattcctggacacatataccttcccaagactaaaccaggaagaagttggatctctgaatagaccaataacaggttctgaaattgaggcaatcattaatagcctaccaaccaaaaaaagtccaggaccagacagattcacagccaaattctaccacaggtacaaagaagagctggtaccactccttctgaaactattccaatcaatagaaaaagagggaatcctccctaactcattttatgaggccagcatcatcctgacaacaaagcctggcagagacacaacaaaaaaagaggattttaggccaatatccctgatgaacatcaatgcgaaaatccttaataaaatactggcaaactgaatccagcagcacatcaaagagcttatctgccatgatcaagttggcttcatccctgggatgcaagcaaggctggttcaacattcaaaaatcaataaacataatctgtcacataaacagaaccaatgacaaaaaccacatgattatctcagtagatgcagaaaagtcctttgacaaaattcaacagcctttcatgctaaaaattctcaataaactaggtatggaggtaatgtatctcaaaataagagctatttatgacagacccacagccaatattgtagtgaatgggcaaaaactggagtcattccctttgaaaaccaacacaagacaaggaggacctctctcaccactcatattcaacataatattggaagttctggccagggcaatcaggcaagagaaagaaataaagactattcaattaggaaaagaggaagtcaatttgtctctgtttgcagatgacatgattgtatatttagaaaatcccatagtctcagcccaaaatctccttaagctgataagcaacttcagcaaagtctcagcatacaaaatcaatgtgcaaaaatcacaagcactcctataaaccaataacagacaaacagccaaatcgtgagtgaactcccattcacaattgcttcaaagagaataaaatacctaggaatcaaacttagaaggaatgtgaaggacttcttcaaggagaattacaaaccactgatcgatgaagtaaaagagaacacaaacaaatggaagaacattccatgctcatggataggaagaattaatattgtgaaaaaggccatactgcccaaggtgatttatagattcaatgctatccctgtcaagctaccactgactttcttcaaagaattggaaaaaactactttaaatttcatatggaaccaaaaaagagcctgcatagccaagacaatcctaagcaaaaagaacaaagctggaggcatcacgctacctgacttcaaactatactacaaggctgcggtaaccaaaacagcatggtactggtaccaaaacagatatatagaccaatgggacagaacaaagtcctcagaaataacaccacacatctacaaccatctgatctttgacaaacctgttgaaaacaagcaatggggaaaggattccctatttaataagtggtgctaggaaaactggctagccatatgtagaaagctgaaactggattccttccttataccttatacaaaaattaattcaagatggattaaagacttaaatgtaagacctaaaaccataaaaaccgtagaagaaaacctagacaataccattcaggacataggcatgggcaaagacttcatgactaaaacaccaaaagcaatgatgacaaaagccaaaattgacaaatgggatctaattaaagagcttctgcacagcagaagcaactatcatcagagtgaacaggcaacctacagaatgggagaaaagttttgcaatccacccatctggcaaggcactaatatccagaatctacaaagaacttaaacaaatttacaagaaaaaaccatcaaaaagtgggcaaaggatatgaacagacacttctcaaaagaagacatttatgcagccaaaaaacacatgaaaaaatgctcatcatcactggtcatcagagaaaggcaaatcaaaaccacaatgagataccatctcatgccagttagaatggcaatcattaaaacgtcaggaaacaacagatgctggagagaatgtggagaaatgggaatgcttttacactgttggtgggagtgtaaattagttcaaccattgtggaagacagtgtggcgattcctcagggatctagaactagaaataccatttgacccagcaatctcattactgggtatatacccaaaggattataaatcattctactataaagacacatgcacacgtatgtttattgtggcactattcccaatagcaaagacttggaaccaacccaaatgtccaacaatgatagactggataaagaaaatgtggcacatatacaccatggaatactatgcagccatataaaaggatgagtttgtgtcctttgcacggacatggatgtagctggaaaccattctcagcaaaatatcacaaggacagaaaaccaagcaccacatgttctcactcataactgggagttgaacaatgagaacacaaggacacagggaggggaacatcacacatcagggcctgtcagggggcagggggctgggggagggataacattaggagaaatacctaatgtaaatgatgagttgatgggtgcagcaaaccaacatggtacatgtatacctatgtaacaaaccttcaccttgtgcccatgtaccctagaacttaaagtatatatatataaatcacctagaaatgatatgattctaattgttaaattaaagtagctctagttgcttctactgggagcaagcctagctcctctatttttcagaatgacaatgatacagctaatagagaaaatagagtctgcttttcgccagctcccttgtggactgtctctggacaggatattgacttccagtgagtggtacacaacttgaaaaaaaataaatgtaaatattgaagatacaggaaactccaagaaatgtttgttcctgcacctagcacagggcctggcacatacaaagcatccagtacatgtttgttcatgtgaataaatgaacaaatggactgtgggactaaaagagaggcagctcccagtctctaaactagcacatagcggagctaaaacactgcactttggcaaggaaaaggatgggggacaatattgttgtttcatagcagtcaagcaaaatagaaaataaagagtctcttccttcatgcagcttttctcctgggtatggtggctggtattgatggtccccaagggtctagtgtctgaggaaagaagagtaagaagtttaaggagattatgaaaagaagtgtgtaaaaagaggggatttcactccactctctatcaaaagaccctgtagtctaccttgttctgggaacaggaagagcctagatttgaataaattttgagatggatattttaaaatgaatagggccaagtcttaaatgtcaaagtgggactgctcttaggctcaagtggctgagaagctataggatttggccaagtttctacaaaggagctgattcctctcaggaagggggagttgacatagcactgttaggggaaatggccttatgtttatgtcctcgtaagcagagatttttccataaaattattacataaataaaaacaacaacaaaaacataggaggaagtgaaggaaataaaatggaattggtgagatcgtatgaagggcagggcagtggagtgggagggatgaggcttttctaggtagggtgtggtggggttgccctgaggaggtggccttttggagctgatgtctgcatgaaaagaaggacccagccatgtgaaaacatgagtgagctctgcaggcaaaggcaacagcaggtgctaaaaccaggaatataagtccagtgtgactcgaaggagggaagacctgatatgtgatgaggtcagggatcaatttctgggagaccttgtgggccacaggaaagtttggattttattttattctcagtgtgaagtctctggagggtttcagtcagcaaagagatgtcgtctcttgtgtgttagaaggatgcttttgagtgacatatgaagaatggagaggacaggacgagtgtggaaacagggagacccagttccacagtaactagctctattttctgactatcgtattaacatctcaattgttgttgtcattgttaatgatgaatacagaataggccccagaaaacagtggaaacccctgatggtgaatgctggacaaatctttctgtctcccttagcttcatagcaattgtgaaataattgctattaaaatattaacagctgtcatgtcctcagtgctcactaagtgccatgccctgggccaggcatattaattaatcttaccttatttaatccttataagaatatgcaccagcaatgctgtagaagaggtggcagctgttaatagccaaatacaagacttgacaagctatcaatttcgtcaagcaaatgagtagcagtgcagtgatgtaaaaccagttccatatttgactaaattccctcttttaaaaaagctactttattactttatttacaggcctagccttggagaaaagactttaatatcaaaaggaacacgtgaaatagtcctccctacatgcagagatattttgaagttacaggcagtgtcaggaatacatcttagaaaaattactgatcattttctaaaatgcccttcagatggtatggcttttaatatttagaaattttgtgttacatagtgggttccaatgtagtttttctatttatggagggcctcactttaatgagcaaacaagattccatggagctgtgcaaacactgaatgaaggatgactgtggatttgaaattggaaatttttgtcagccaaggagatttttggggggtttgtttccatgaattcagttttacagtttttagttgatgaaatgatcaaaaccttttggctctaagctaacatccctttgaaatgtaaaattaatagtttaaaacttaaaggagaaataatcatggttttaggttttagaatatgactagctgttgtgagtatttggagacaaattttctccttaaataccactgtccgggtttgaaaattaacctcttttatgtacagttggaaagtattttcagtgtctgtcccttttgcatactgtgtggttctatgaataacatgagggttgttggcactaattgataacaaagacttaaaaataggttttgccataataagaaactataaataatggatgaataaagaacattttataattgtttaaattttgttctgagggttgttggcactaattcataacaaagccttaaaaatagatttgccataataataaactataaataatggatgaataaacaacgttttataattgtttaaattttcttctaaataaagaaaaaacacctgtgataaaagccgagaaaacccgttatgaagaaaacagttgggaaaaccaaagtactaccgaaaacataaaagtatcctttcagggtattagaaaaatcaccctgtaagtggaagtgtgcagttacttcacaccaatgctagaccacacaagactaaggcgagggggcatagctgggtttctagaaagtcacctactctaatttattatgttactaccgtcaattgagcatcttgctaggtatttaaaaacatgttctcataatatagatcttgctctcattttatagatggggaaactgaagcttagagaaattaagtgggagaactgggttttggactgaagtcactatgctacactgccttctagttattgtaaaaagctgtaaaatttaggtgattggtgaaacaaaatgtacagaaaagtataatactcttgcattacaagtataatactcttgcattacaattaatgagatttttttgattagtaaaaagtattctctttctgtctctgatgtctttctttcctgattcatatgcttcttcctagaagtcatgatcttggaaactgtggacccaacctattcttacataccttttggcctgaagcgaaatcccttattctcccttcattccccaccccattcctccctccacccccatgcctctccatctctcttcccctgtcagggttgggtgcatgagtggtctgtggtgctttgggtagggtaaagaattattatagtcattaaatttaaaaaaataatattttgtcttttataagttgacatttgcaatggaaactgatttatatatttaaatacatctccatttttaaatgaattaaattttggacaaatccttcaaacatctagaagatccttacagaccacattggaactatacttaagaaccactgcttccaagattgcttagagttcagacagttaccacacagtgacctgtgctgccataataaaatttgtattggaaaaaaaaaaaaagaaacattatcagttcaaaggaagaaaataagtggtgttattctaataagatccaaaggcagttttaactatggcttactatgatgtttgggctgtgagccagctagttcctagccagaaaagttagaactgataagagcagttttaatattgtcatcaattattaatcacctacaacataggacttaggtttggatgacatattgtttcatcggcattcaactcaattatgaaactgaaatggaaggacacaaaattgttaaaaaatcctctaaagtcagagacataaaaattgcacatatcttttcattgtattttctagtatcctttctaatctgaatctaatcttgtatttaccaccttaaaaatggttggattcagtctaacaaacttaataactattactagttgtgtggctaaatcttttttctaaaaatgtttttatgtcaatagctgaggtccctgttttaagagcatggcaagtagatttttctagtgacatcacagatgtgtattgtctttttctgaataaagtctactagggatatttaatttaggtgtaattaaacagagttacaagatctaccactttgagtcattgattgaactgtccaaacaactggattgactcacctttttataccacctacagtgacatagctgtaatgagtacattgagaagtaacatatagttaaattgctggaaattagtatcatcacttagtagccacttttatcattagaaaaataaaaattaccaaggagagaaaacaacagtttaggcttgggcttattatatttctgagaagttgatttctttaaaaaaaatttccctctgcagtacctttctggcttcagttccttaaaggaagcagctggggaggtgtaggatagtagtgagggcagggtttcagtggaaaacattcctggccaaagtcctatacagtgtggaagccaagacttcagagtctttctgtttcttttggtctctgtgtctcttcctctttcttctttaagtaataatttgctgtatttgcaatacttgtgaatataagtgagcataagtggctttctcctgtagcagccttttgaaaaatgtgaagatgttattccttgtaagcatttaaaactaaagttgaaagaatagaaagtgttggcaattgcacatcacacaatcgcttatctcttcttcaataatgtactattcagcacagtatccattcccttagctaagggaagctctgtggaattgccctttctcccacttaaaaggagctttaatttcctatctctatctattctgaatggtaattggacattgagattcttgtttcctgatttatgatgataattagggcaacagaagaataatacaaatttgaccactgtcacataaaacgaaatgtaatctgaataattacaaggctaggtgatgatggttcttcccctcaccttcttaggagggaaccagtgaggtaacacatttgtattaaatgaatgggcatttttgagcttggccaagatgatgataccattcacacctagttcctgcaggaaaatatgaattctaagtatccatgattgtggctactgttttatcactagagttataaacattttgttcttactgtcccttgcctgccagactgccctaaaagaagtgaaatagtcagaaagacaactcatcagggaggtgatgcttggtaaggggcttctggctgctctcctaggggagatgtttgttttctttatttctgtgctggttcaaggtgagggagatggacagctgtgaatgtgagagatcacagaaagatgagagcagggtgaattcatcagggagcactacccccaagtgcaacctctctctgctcagggctgtgcccaggcatatgacccacactgtatttttgggaaaatgagagtgactgctgaaagttcttttctagcatagctttgtgattacataatactaacttactagccttttgaaaatggaaacagtccttaaaatattctttttatggtctgcatgctattctgataataggcacaattgccacatttgggcttctgtgtatttataatctttgcctcagaatttaagtagaaactcactttttgtgttacacttaattaggttgggatctgttctgtaggaatgaattttactagcttttacttctgtttcttttaatgaaaattcctcaaatgtagttcagtgtagagaaagggcaaaagagaaaggagataatgtttgcagagagcttgcagtggtgtagataggcctttgtgctcattgtgtttgtttataaaggatctcatttaatactcacaaaatataggtattcaggaaaccaaagctcagacagattgggtgacttgctttgggtaacataattagcattcaatagagataagattcaaatcttaaggtttttgacttcaaagctgtatcagattggacacaccttacagtgaaatttgtgcggcaatggacaatgttatagagtgtgcccgtgtaatgattcttggtgtttgtaatacttgttcaagctggccagagctgatttttacatatcctgcaaaatggcagtgtcatgacaaatcagtgtgtataattaggaaaagaaaaatgttagaaatctatttatgctttataattaaaaaggcactggtttactgccaaattgacatacattttggaatcagactgtaagataattctttcatgttacttatgataaataatgctatttaaatgtctaaccatttgctatagcacctggctgagctctcagaacaacactcccattaccttctcagatggtcttgagtcatatacagcaatggagaaagtttgtttttaaggacaatgttatgatgtgacaactgtgtctttaaatataccagttttcaatagtttaaagctacaaagcttccaagagataacgtttataattctaaagccttatcctaaataaggtaacacattcattgtatagtttgattatcccatgtgtttgtgtagtaactgtgtctatattgtaaaaagggacttgaaatggtttctatttttgtttctgtatatgtcatccctactttgatcacttccttaacaataataactcctcctcccatcccactacaaccctgtatcagctagggattgtatttgatttcaagtaaaagaaactggtctacactgacttaaccatataggagtctgcttttctcacgtaacaaagtgtacagctagacagtctggaactgatgcagtggctccaggatgccctcaaagctctagtgtcgtctgtttttcccttttgtcttccttagtacgtggctttcattcttatggttgcctcatgttacaagatgactgatccacttccaacctgttgttcaaggtaagaaaaagaaaatcaggtgtcaagcagaaaggggctgtgttaccattgggaaagcaaaacttcctggtaatccttagcagcctcctgcatatgactttttggtctgagttgtcatagtcacccctagctacaaggcaggccggcaaaattagtaatttgtctaggctcattgctaccttaaaaaatgtggggttctgttagtaggtagaactggtgaatgtgtattgggtaacaagttagcagtgtccaccctgacccaaaccctagccctgaactgcctgcttacacttggcttttggactaggatggtaaatggaggaggaaatggtaaaaaaaaaaaaaaaaagccactttaagattttcagggggctctttattgctctccattgtgtgttttcctcttctcttccttggtgttttgctgactctgctccctctgactttggtgatcacttttccttattattattttttattactcatttgccaggtatgtcattttcttagtgtaactttctctaacactccaggcaaagtgaggcagctgccctttatatatgcccagcacctggaccttgtttttgtttttgatttttttcttttttgcgtatttattacaattactcttattggtctgtatgtgtgtatgtgtgtgttatttgtccagtgctttgctctgttcttcactaggctataaattccttgaggccagcggccatatttactttgaatctgtatattcctccttgccccagtgtctaacacggtgcctaggataaagtggattctcaataaatatttgaataaattaataatgaatatattttgttggattttctttcctgttttttcttttttaaaaaaatgcatttcttttcatcctcttactctgttctcactttaagcattatttaagtattttcgttaatattcatccattcatttatatttctatttttctgtccctgcttctctctctctggattaatcttcccctctctcagatgagtattatctttacatttccatcccagttttcttactcaggtttcagttatcacacatctgactgcctactgctttttaactggaatgcctctccatcaccccacactcaagaagttccaaatgacatgcatcagctccccatctcaattttctagcctctgaaaaagatgacaccttcttctttgaaaatgatgacaccttcttctagctacttaagcttgaaaacttggtgtcatttgtgacatcatttatttatatcaccaagggctatttctgcagcttggcaaatagctctagctgttctgtattcttattgccatcacctaggagtacaacgtgtagggttgtgggtgctggtacatgtgggatggcaagatcaagggtgaacaggagtcagctgatcaatgttctccatcaagcagtacactcatttatataccatgttttggtgctcatgactcatggaataatcaatttagataatttgggattactttgtagtaaaatttaagagaacttagctacttaaaataggtcgtgaattttgtgatagatatggacaacttctgcagtattgatgaaaatatcagaaaacagtattaaaatctacagattatagttgcagtaataaagggttttgtaaagacagattagatgttcccattcaatcgatcttataatgcagaaattagtggaaattttttgaaattaataggtatgaaacttaggaaagttagcacaattgcttcatagatgatctcattaatcaagatgggcatttttcttttatagaaaatagtgaattatctgaatatattgaatgaataaatgaataaggcagtgtctctatactaagatgattgtttgaaaagtgaaaaaattttaataaactttattttagtatttgtagtcaaaactaccagttttaaaaaactatgagcaaagccacatttaacatgaatcttctacaagcatattgtgaatgtataacttttgcatggctttagattcgtgacttacatagtatttcagaaattgagagaacacatcatacattaccctagttattataaagaatgcaggtttctttaggaatttttttctgtttggattgagaaagagcaatggtttatgatacatttcattttttgtttggtgcatttgtcaaactgaaatttatctctgtcaccatgttctgttggagaggttttttgatagatacatatttagatatatagggcacagaggcagtaacacgattatatcattcttaatttccccaattttatatcatttttcttgctttgtcattcaagcatcaatttgattatggggattacacacagagaaaagtgttgtttttggaatgcataaagactttgtttccttttaagtttacttcacctggttctgctccttttagtgtatctaggattggaatgtaggaattagggccatgcttagatttctgctacagtctaactcccgtgggaggaatagtgcctcaaaaaggagatcagagaccacgattctattcctctttattggtggatgtatttcatttattatttttagagatgcttctcccctggacattttcatgtgttttccaataggatagaataaatgttatttgggttttcatctatcataatagaaagctactgtcatgaagagaaactagaggcttgagaactagggcagtgttaagtcaaatatctaagcttgtttgtatggcaaaaacagtgaataagagatattcaaggaatttttaaaaatatgcccaatctttttctttggatctcattctctcaaatgtcttaaaccaagaggttataatttaatgtcagttcaactaaaatcatttgaattgattgtcactattcagcaataaattaagttcttcctctttcagctggttgggcttatttcttttttatacatcaaccttctgtatgttgatatatgtctccctaatgaaataggaaaatcagctctatcaaaaacatagagtaacaaccagtcctggtgctggtaaagctcaggtattctgtatataaggaacattctctttatcattttatggaggtagaaaatccaaggataagcagccagattcatgttttagatgtaatagggtagtggtcggaattgcgaacagtgaaagtacaaatcatgcctattgttgaatagcctgtaccttatggtttaaggtcaacagatgaatacagaaaatggctttaaaactatacttgccatttgtaggttaacagcctagtatccatccccttacctttttctcttcctacttgaacctccgttttcccaaagaaacattccagctccatcctatcagcatatcacaaatctctggacacagtggtttggtctatgtgatgtaataggaggacacatatattggatgctcagaatgactcttcctctttcttctttggttcatgttcattctctctctctctctctctctcttttcttcttcttcttcttcttcttcttcttcttcttcttcttcttcttcttcttcttcttcttcttcttcttcttcttcttcttctccttctccttctccttctccttcttccttcttccttcttccttctccttctccttcttctccttcttccttctccttctccttcttctccttcttctccttctttctttcttcttcttcttcttcttcttcttcttcttcttcttcttcttcttcttcttcttcttcttcttctttcttcttcttcttcctcttctccttcttcttcctcttcttcttcttctctctctctttctctctctctctctctccttctctttcctttctcccctcccatgttggatgtgcctgaagtatgaagcggttcttgctactcgtcaactgactttccttcacaggaaggccacacttaagttgaagttgacactctaagtggcagaaagaaagcatcctagccaatttagaaccatcttatttaaaggcaggtggcaaaactaatttaattgcctataatttctttaccatttaagaattttaagccaaattttgaatgttatactcttaaaatcaataccaataatatctatcagctatagagttcttactatgtgctaggcattgtcctaggtaatttatatttatgtctgtttaatctgcacaaccgtattatgagttaaatattaccatctccatttacagatgaggaaactgaggcactgagagtttaagttacttacacaaggcacacagctagcaagtggcagagtcagaattcagtcccaaaggccgtgctgctaacctactaagtcatgatgagacattgaatttgtagaaggctattctgaagatcatttaggtcttcatcctgaatatcctaaaagcagccccttgaagacactttcgcaggtggagcttttgagtactagataagttaaagtcttggtcatggttatataataaatgggatgaaaaaggcagcgatggtgtgctagaaaataatttggatcggtgaacacaatttgctccactgtctttgaggccagcggcccctatttgcttctctgtcttctcagtatccccaggcattctgcctttccatctttgaccttgtcattatcaattaccatgttctgggaatccagatggtgccttgtctgattatcctcactgcacaccaagaggaatgatcctttacatttctgctgtggcccataactcaccaagagtcttctcatctacaatctcatttggacctttcagccaccttatgagatgggctgatgcactttgtcttaggtgcttatatgtcaatttgctttacattaatttgcatttataatcatcttaccttataagcaagtgattcttgcttctgtattgcatgttgctgaacttgcagctggactataagctccatgaagagaggatttgattataggttttatgcttgacattccttcagtagagttccctcttagttcacaggattctctcaaaaacaaaaacagctcctgaaaaagaactcattaaattattatctggctttccagagtcaatagttaaatgttcaggaatattgtcagcaggttactgatctgttagcagtttgacatctatggtaagattacttataccacaaaacttgggaaaggctacacatcagggtaactcttcatccctgcccactgcccccatcccccatcccccatcccccatccccaccagagagccagttagccaggacactcctgtttatagcatttccataggaaatgtggtccacaggcacctgccttcctttcccctttgtggattaggtagtagccatgggtcaagtgtttacactaggggagaaggtggaggtgaggtcattctgctggtctccatgcctctgctgtcatgactctctgagcagaggttgacagtttatgttcactgtagaaaacccaactacagaaaacagctcagagaaaactggattgggaagcccagaatgggcatcacttgaaactggccgcctctctgctccagcctgtgagtcctcccacccatccttgattgaactagttaactgatcaagctgtgtttatagggatatcagggtaactttgggtatcaggtaaaagcattcctgattaaaagtggtttcaaccacaaggatcattatcatttacttaacagaaagtctagaaataagaggcccagagctggttcactgtcttagcaatgacctcaatgaccccaagctgtttctcgtcccctctctgccaccctctgtgtgtgaatagtgtttccccttctggctgcaagaaggctgcagtaggactaaacaataagatgctaatacaccttctaaacccttgagaatattttggatttgtgatagaaacaatggaaatcttctcttttttctttttcctgaagcaaggatattattttctccttaaataaggtgtaaaaggaataaaagggaagtgacaaatcttacagaatattaaaaatagcttcatggtaaaataattttgaagtatttatttccaattaccaggaaactccagtgattctatatgatggcaccattaaggaagccagcaacccaagaccatcatagaagctgtgatgtgaactgaaggaaaaacattgcaagaaaaataagcaaatgctttcattatgacatccaaggcagtaaaaatgctatttaagtagagcggaaggcccaaatgcctgcaattatggagtatttaaatttttttcacattgcaaaaaattaaaatatttatacttttatggaaaggaaaattagataaagctgtcacataagatactgaaatcctaggaattagtgtgcatccctgctctgagagacttgctcttctttgtttcttattgctagcacagtattgggcacaccgggtatacagaatgagaagaaaagacagcaaaggatgcatatagtagaactatagaaccaagtagaaatcgatcttgtcagaaggaaacctaggcctgggttattggaacacagatggattggcttcaggtggatttgaggagttgcaggtgcttggatctcatattttttcattttctgcagaggaaacagagttagcccagaatccaggtgagttgacagttaagcgcagagagcttcccagctaggatcactacactcacatttccttagggccagttttctggttcagtctctttgacaccaaatgttgtttttccttcaatactgttggtgacaattaagttatgaaatgattaatgtcgattcacaggtggctgatattagtatttgccagctcaagttttttggtgtggaaggtacaaagtaattcaaatgagaggctggattagagggcagctgtagcattcatgccagttgcatcatccacttaaaatacagaaggaaggcattctaggctgagaaggtaagaaagtactatcacacaaagtttaggatatgaaggaagtcttgtaatctttctgtaagattttaatttttaaaaatagtgatatgtgagtacatatggtataaagcttttgttggaaatctgtcttcagtgaatcagaaatgaaaaatttgctttaagtgttgaacatcacaatctattttcatattttaaaaaactacaactattccttagaacacaataggttttgtctttttttgtagaagtcttcattaggcttcaggcacagagtaaagaggaagaagaggcggctatatatgcaagtagtttaataaacattatatatcatgatcacaactgcacatcctaagtgagatgtataaatttagtaaaaattggaagcactatatttgtgaaggataacagcttagaacaattttaatttatgtagttaaaccttcaagttatgctttgcatgtggattctcattaaatgcatatgttcaagttaccacagtgagtttattttactgaatgttgactactttttctggggcagcatctcccctttcacaaagaatatgtgaaaggccaagggtgtccaatttcgtaagtattgctgtgagttttaaggttgtgctattttgtattccatgaatttgttattgagtttcatagaatctgatggtcaaaagaaatgtctcctaaatattaccacagactgagtaatacatggattttaaaaaagagataatatgtgagaaaatgatatagtataataagtaaaactcaaggacaataataagtaataatgaactagatggtaatctctttgagttcaggacccttatttaataattactttcctcctccttctcttcctcttctccctccttttcctcttcctccttctgctcctctttctctttctttcattaaatcctacacaacaagtggctttgaatatcatatctactcaaaaaacagcttttgaattaatgagtggatacctaaatgtttttgtccctcctcaaatctggctcactgtgttgggtatactgagtgattgataagcatttgttcaatgaagtttctgaattacagaattttttcactaaggagctgaattttacagtttttgagtttatattgtactgagtgagaaactatcacaatgttgttgggtaaaggttttaatggtcccactttaataaatacatcatttagaattaaacatgatattatgcaaatactgggaaaaggattgaaattaatttgttcaaatagatggttttctctttacagttttgtatatattttttcttgtttggttttatatatagttacttcctgacatccagccatttttactactttcatgattttttgacatacttgcttaccacctgtacggttatttcccaatattctctttaaattgattcactttgcaatctaaattcatttaaagagaaaacttatattagtaccgtgaacagaaaaccagtattctctgttgcaaacagaaggcaactataaaaatcaatataatgtgatgaaaatgacattattaaatattggccagttctgttgccttgagggagattgaggctgagataaattttcttaaagagagtttggcaaatattagagaagtattaacataaaagacatataagccaggtgtggtggctcatgcctataatcccagcactttgggaggctgaggcagtcggatcacttcaggtcaggagttcgagaccagcctggccaacatggtgaaaccctgacactactaaaaatacaaaaattagttgggtgtggtggtgcatgcctgtagtcccacctacttgggaggctgaggcagggggatccttgaacccaggaagcagaggttgcagtgagccaagatcacaccactgcagtccagcctgggtgacagagtgcaactccatggcaaaaagaaaaaaaaagacatatagatactaaactaagccttatttctgaccatgctatacgggttgaaaagaatttaaaggagaatgacttctttctatactggatcaaatacaaacttcaacaaagaaaaaaaaaatctggatttttcacaattccaaatcagtagggcagtaatttgtgacattttagcactctgtaatttttgtgataaagtaaaaattttctgttcatttttacttttctttaaaacatactcagaattaagaacataggttagagtgaagcttccattttcctgcggtgcatttatttcctgctcagtgggttacatgagcaatgttgaggttttctatgaggtaccacttactgagtcaggtttatactttctgtatcattaatgctttgtaaagaatgtcattctaggaagtgcccacatagttacaatacacatgtgagtaaagtgtttcattaacactttagcgtcttatggaacaaactcagaagagcataggtataaatgatcaaaattccaaattaatgtaaatacagctaatgagtttttaggccatttttaaaatactttattctttagctattgctttggactggttctcttaatgttgataaagatcactctaggtcatacttgaaacacaatcagtttgattctcagctgaaagaattgatttcttaacaagtaaagtagtagttaatttagtcaagcccccactggtgtcacattaatcaaagtcaaactgattttgtgcagggatggaaaaaaaaaaaactggatcattggtttcccctgtcactacaggaaaagttatgtggctcaacatagcctggcaaactaaaagaagaaagaatgcaaatgaagtgtatgatttagaaatgttagataagatggtggcatgtgttatgtaatgcttcttaatgagaattttataaatgatttattacactgatgtagataaaaacatatttgaaaagcggaaaagtcaaagcagttgacatctttgatgagcaacggatatatattttactttcactatatagaaagcagccttcaactatatagaatatactgtcatgaccaatgattgatgctttataatcctgggaacagaggctgtttttaaaatggccatggaacttttgaatattgtttttgtactactaattgacttaaaaataacagatttaaattaaatcaagcagaaatgccattacaagacaaaaacaaggcttaggtaaatgttttacttttaatagtttgtctgaacaaacactgagattaaatttcaacataaaacacaaacagtttgaaataatttagagaacagcacatacttttcacaaatgcattgcaaacaatttagtgcccaggtcctgaggcatgagggagaattttaatagtatttataagcatgaatttactttaaaatatagatggttgacatttggcatgttttcttcttctttcatattcttatatccaagtgtttctaagattttctaaaaggaagctcattatttgaatcagtcagttgctaagtggtgcaacatgagggttatggttaaaattctacctatcatgttaatgttgaaaagatagtgttcaaccctggctggatatttgggtctacatgagaaattctagaaagaaccctatactctttgtatcatataatcaaatacctatttaaagcctctgccagaaagataaaaatggagcaactggtagagactgtacctcttaagtctgactttcctctgcttgcttgtctttctttgtttcattgtttttacactttcgtatgaaagccaaagaaacaattaatcctgacaagtagtgtgggtgattttcaggatctgggtgcctattataattttaagaggatctggtaaattgactcttttaggtataaatacagtgttttatggcaatgtagaagcttggcaatgctctgaacattgttaatctgcaataactactggaagttaggagttttaacaggagctctgttacaatgacttctagattggggcatctctgacttctgagtcctataattctgttggagttcttaagtaacagctatgtgtatcagtttaagttaaggagatacttgataacatattttaatatagagtttcacttggcatctttataaaagccaggtgaaaaagctttctctaactatgattacatgaaaattgtcttggcctgaactttcaaaaaatgcgaaaaatttattatcttttattaaggtgttaatccttaccacattaccctatggtggtctgaaacaatccactagtgataaaacattgctagaagtcaaaagttaatagtaaaaattaatgaaacaagttattaatataaagtaaagcagagtgatgggaagaatcaaggatttttccctaaggggtaacatgttttcttatggaagaattaaaatttttaaagaagtagagcataaaacagactagaaacccttatatttttaccccccatattaagataaaaatctctcctacagtcatgagtgatgaatgtattctctagttttaaaaaggtgaggggtaattaaacaaaaatggcaactcattagcataaatgaaaacaagtactgtatctaccatgccaaccagcaatttgtattaattttatatataaatatttctgagattatctggggaaaataatggccctgaaagaaaggggtaaagagtttgcagctctttgcctttgctagggggaggaattggaattgtttctctccaacgtagaattttagggaaagatgggttccaccttccatcaaggatcccagtgtctactcgacttcagttgacagactgaggctggctacgtaaaataaaagactgttactaagaaagaaggaaaggattgacactggtgagacatcttccacattgagttgattccagagctccataggaggcaaagaggaaaggttattgtattagtcagggctcctcagggaaacagatcaaataggggatgcgtatatatcatataatacaatggaacttgagactatctggtgagaactaagtataaagaagagaagacgttcaaggactgaactctggagaatattgagaggaggatccagcaatggaaactgaggaaaaaagaaaatgccagagaatgaagaggaaaaccagtaaagcactcttcacaggaagtcaagcaaagctagtgtttgacaacaatgctattctccattaagttaatactcttgagagactgaataattgagacacaaatatggcaagatagaggttgttaatgaccttgattcgaacagttcatgggagtagtggagacagacgtctgattggagtggattaaagaaaaagcgggtagagtagataccctttgccaaagaagcagataaatggacggaagctgaaggggcaaatagaattaaggaagtttgttttgtttgtttgctttgcaaggtgagagtctttttacaacatgtttacatgcaaatggaaatgatccaattgagagaggaaaactgaagaggaagcagcaaaggaggggaaaattccagttgcaaagttcttaaatgttggtgctggaattcagtgcgctgtgaagagttggtttatatggaccaaggagatttcatccctcatattaggaggaaaaatgaagtgaatgggtcagttacaagtaagttagaagatttggtgatgggaaaatcaggagatgttcttctgattacttttagtttttcagttaaacagaagtcaaggtcatcatatgagagtgaaggacggtggaaggagggagtattgagggaggctttgaggccagaggaaaatacgtaaaacaaatttttgagagagtgggaaaatgaatttgttatggaaacatagaaggatgctgggtggtggggaggtctttctaagatttgtggtcataaatttaagaaaatgaaggcatttcttaaaattctttcctaaaagtttacataaaatcagttaattcaaatgaatgtttttctttgactacttccagctgctgaggtgcaagtagggagcagatagaaagttgggttttaacagagtttcagtttgttaggtgaacacaggagaaaaagaggataaggaatattggagttactaaagctagtgcatggagtagtcgtggagaggtatacagtgaactagttgctaaaccttaaatgcaagggagtgattgagaaaatagtagataactgtaaaagacttattgcaaatagaatcatgcttggcagagtcactcagatctacaactttgtggagactatgtctggttgaaatagttcacagcctggccttagggggattgaaacaatatatcataaccatcaattagcttagcattttatttttcattttttagtacttctaccctaaaaagacacatattgtctggaacaaagcaaaagcacaatctgtgttttcagggaattgacattctaccagagacctggtagaaaagatactagatgtagagaaagattcacaatttattttttttgttgttgtttaaatgggaacaacaggcacatcaagttgtttctcagctcttgtagagcagaatgtaaatatttatggaatataaaccccttttaacagtagcccagttgggcttctacaaatatggagttctctttcagatacttcaaaatactaggccaaaaaaaaaaaaaaaaaagttcctagcagtaaagttgtaatatatcagacataagcagaaattcccaagacttcacatacgtaatctgtgatcagcacaaaatgatggtttttttcctctttatcttcttcttctttctcctccttttcttcctctttcgtaatgattaggtaactaagaaagtgataaaatagtatctaggcaaatcaataattgtctctttccttcttttcttcttcatccctttctttccttctttaattttttaagttaatgactgtattgcttttataaaagtaacatatgttcattataaatatacaagcaatagaggaaagtccagagaaacatgtaataactcaaatttcacctactagacataatcattataattttgaaggttacgattctggaaatctctctgtgtttatatgtataggtaaaaggatggatagcaagaactgatagccaagttatttttcttcatccttaaagttggggaaaaacaatttcactaaagcactttcttacagatgatcatttataaatttttccaggaatttctcgtgtcctttcaatatacaggtttattttttacctcaatatcggtgaagctttgttgtaccatatcttttaatacattttctgtcacatttattgtcttacctatcttttctatcttctgtatatattacttttaaataattgtttttgtttctgtgtcttttatctgcattactgtgatgtttctcaaatgtttcctctagtgagtaatttagttttcaaccttgtctattcatttctttgatcttattattttattaatgatattcttttgccactcactctgttttattacttctgcaatctttctgtttcattttgttatttcatcacctggttctagagctatagtaattgaattcatatccatataactcattttattaaagtatttgtggtgaattttcataaaaatatttttaaaaggtaagagccactatttaaataagtgctcttatctgatcataattgcaactattgattggattcgcctagtttgagtactttttattaataatgtatgtgtttataaagtccttaaaaaatttactgagaatgaagggctccactcagcaaaatgaactgttaaaattgaactaaacaattaattaatgtaagtatatatacagaaaaattcataaatagtgtacagatacacctacatattgttttggagttaattgtcaaggtgttggtaaaacccttaaccacaagattctaagaatatctctagctggttgtagttggattatctctctgttatggtcttagttcccatctatttagtaatcttctgtatcctatgctgacccatgctggctcatgctggattggtcattttcaaaactaaaagcagatataattgtagaaaacaattagtctgtctaccattgttcaagtttagactttgacgtgttacctcttcattaactcaatttctgtagtttagtatctgttctatttgacacgacacagctacacataatatggagtgctccagagagttgcagtactcttctagtacacaaattgcaaaaatttcttggcacaaaatgtcctccctttcttctcctgttgtggaagaggttttatagactttcttcatgtgggtgggaagggactaattctccatctggatgccacctgtaaaattcacactttttctcagaagaaatttaatctatagcaccaaactatttcatgttcttttaagcagtccttgtcaccattctctaggagctaagtgtggagattctttacaggatgttttcctaagatgttgctgtttatagaatcaatgccacttgtatttaaaattcatttaacgaagtaaacatcaaccatcagttgtaaagtgtcccatgcaaaaataatcatgctatgtcttcatgagggacaacttgttgaaagtacattatgatacatttgattttgattatgtatttggttgttatctagcctgtcagtcaactcactcccacctaactggaggactaaaaagttaagtgtccctggcagagcaatggaacagtgcagtgtttctcaaattgtttgaaggctatctgtactaggatcaccagagagaggttagaccagatcttagaccccaattccccagacctctgggaatttgacttaagaacatgcagtgtttgagaaccatagtattagtattaatggtagtagtagtattagaagttgcctgtaagatcactagagaaagtgaactttattaaacaacatagaaaaactgcacaataaatttatatctgtgcaaagaggaatatatacaccatcacttggttatgctttcaatgttttaaaatcattcctggctgaaacctagggtttctgaacaaattcttaaaggactaccttggaggtggaagactgagtattagtggactgtcctggtcaaggaggcaatggcagtaacaaaaatgcacaaaatcttattatcactcccagataaagtggtttactaattattatacttcgagagctagccatggcagaggtttcctaaattctgtctcaagtacccactgccaagagcagttgtcatcttttaggaggaagatgtcatatagtgttctcctgactctcaaacttgtttaatctgggatatgtacattgcagtagaaaagactgtggatatttcccagctgggtaggaggaagaaattttttctggtgttgccagttacctggtattctgcttatccttaaacttgatttatacccacattccagcttacttgtgggtaagcttagccatattgcgttgatgatgcactctgtcacagcctcagcaagtatataatgtagattcagtaatgggtatagatccttatttctactcttaaaatcttctttactgaggcatgatttacatttaacaacatgcatccattctagtttgatgagttttgacaaatgtatacacttatgtaaccaccaccactataaagatatagaccctttttattatccaaaaatgttctttctgccactttgtagtcacacctctctcctaccagccacaaccccaggcaatcaatgatgtgtgctctgtcattacagattagttttgcttattttagagtttcatataaatggaatgatacagtgtgcctatctttttttgctcagaaaaatgtttttgaaattcattcatgtaattgcatgtaatgataataacaatactctattctcttatcattgcctagtagtattccattgaaaggatgtatcacaactgggctatccattgacatactgatggatagttgggtttttttccagttttgtggctactatgaataaatctgatatggttattgtggcagggttggcatatgattattactcttggaattgttgggtcatatggcagacatgtgttcaacgttataagaatctgccaaacagatttacaaagtagtggcaatattttactttgcaactagcattgtatgagaattccactcgttctagccttttaatttttagccattctaatgactttgtaatggtaactaaatgtggtttaaatgtgcattttttgatgtacttagtggcctttgtatttttatgaagtgtctgttcaaatcttttgacagttttttaaatgagtttttgtcctcttgttgctaagattcaggttattaagttctggacacatgtatgtatacaaacacatgtaattatagtctatatttctatattaacgaattgatataatttatcacttttgggtttttttgcaaagttttctccttttaggagattttttacatttaggtctgtaattgataagttaattttgtatatgatctgaggaaaggtcagagtttatgtattcatatgcatatcttgatgttccatacaatatgttgaaaacatttttcttcctattaaattatcttggcactttgtcagaagctaattgatcatatatgtgtctatttctgacattctgtcatctattgatcaatacatctacggttaacaccaatactatgctgtcttgattattgtagtgtttctgtgagtcttcagatcaaatcatgcaacttagttcttttcaaatgattttggctattgtggatcctttacattttaatatgtatttcacaatcaatttgtagatttcataaaaaagtctcctagggttttgttttgtaaataagggtgttttagtatagtaaaaaaaatataaaatttgctattttaaccatctttaagtattcaattcagtggcattaattacatttgcatcgtcgtgtcaccaatatttccagaattttccatcaccccatacagaaactctgtacatattaagcaataactcctcattccctccagcccctggtaatctgtaatctactttatttctgtgaatgagcctattctagggaaattttccaattctaggtatttatacaccatataagtggaatcatacaatattttctttttgcatctggcgtatgccacctagtgtaatggttcttaaaatgttttttatttttaatttttgtaggtacatagtaagtgtatatatttatggggcatgtgaaatactttgatacaggcatgcaatgtatatcgtcatagtaaatgggatatccatccccttaagatttatcctttgtgttagaaacaatccaattatattattttagttatttaacaatgtacaattaagttattattgactatagtcacccttttgtgctatcaaatactaggtcttattcattgtttctaattatttttttcacccattaacaattcccactccctgccccaccacatccccactaccattcccagtttctggtaaccatccttctgctctctccatgagttcaattgttttaatttttagttcccacaaataagtgagaacatgcaaagtttatatttctgtgcctggcttatttcacttaacataattacctccagtctcatccatgttgctgcaaatgacaggatcttattctttcttatggctccagtactccattgtgtatatgtaccacattttctttattcattcatctgttgatggacacttaggttgcttccagatattggctattggctattgtgaacagtgctgcaacaaacatgggagtgaagctatccctttgatatactgatttcttttcttttgggtatatacccaggggtgggatttctagatcgcatagtcactctattttcagtttttgaggaattttcacactgttctccatagcagttgtaataattcacattctcaccgacagtgtaccagggctcccttttcttgacattctctccagcatttgttactgcttgtcttttggatataagccactttaactggtgtgagatgatatatcattgcagttttgatttacatttctctgatgatcagtgacattgagcaccttttcgtatgcccgtctgccatttgtcttcttttgagaaatgtctgttcagatattttcccctttttaacatcagattattgtattttttcctatagagtttttatagctactgctatattttggttattagtttctcatcatatgggtagtttataaatatcttctcctattctgtgggttatcttttcactttgttgattgtttcctttagtatgcagaagctttttaactgatgtgatcccatttgcccatttttgctttggttgcctgtgcttgtgcagtattattcaaaaaatctttgcctagtccaatgtcctgaagattttccccaatgttttcttatagtaatttcatggtttgaggtcttagatttaagtttttaatcccttttgatttgatttttgcatatagcaagagataggggtctagtttcattcttttgcatatggatatccacttttcccagcatcatttattaaagagatgatttttctccaatatatgttcttggcagctttgttgaaaataaggatttgtttctgggttatctattctgttccattggtctaggtatctgtttttatgccagcaccctgctgttttatttgttattgccctgtagtataatttaaagtcaggtaatgtggtttctccagttttgttctttttgctcaggatatctttggctagttggggtcttttgtagttccatataaatcataggattactttttctacttttgtaaataatgtcattggtattttgacaaggattacattgaatctgtagattgctttgggtagtatggacattttagcaatattgattccttcaatccttgaacatggaatgtcttcattttttttgtatcttcaatgtcttttatcagtgttttataattttcattgtagagtttttttcagttctttaagttaattcctttgtatttcgttttatttgtagctatattaaatggaagaactttttttctttttcagattgtttcatgttggcatacacaaatgctactatttatattgattttttattctgcatctttactgaatttgtttatcagttctaacagttttatggtgaagtgtttaggctttaccaaatataatataataccatctgcaagtaaggacaatttgattttttcctttccaatttggacaccatgtatttctttctcttttcaaacagaaaacagctctagctaggaaggacttcagtactatgttgaataccagtggtgacattggagttctttgttgtgttctagagcttagaggaaaggctttcagttttttcccattctgtataacactaactgtgggtctgttatacatggattttactctgttgaggtatgttctttctatatacagttcttgagggttttaatcataagaagatgttgaattttagcaaaaggtttttcagcatcaatcgaaatgatcatatagtttttatccttcattctgttgatatgatatatcacattgattgattagcatatgttgaaactgggataaaccccacttggtcatgatgaatgatctttttaatgtattgttgaattcagcttgctagtattttgtgaggatttttctatcaacattcgtcggggatattggcctatagttttcttttttgatgtgtctttgtctgattttggtatcaggataatactggatttatagaatgaattcggaagtatttattcctccatttttgaaatagtttgagtaagattggtattagttctttacatgtctggtggaattcagcactgaagccattggttcccaggcttttctttactggcaggcttttcattacagcttcaatcttgttactttgttattggtctgttccatttttgggtttcttcatggttcaatctgggtaggttgtttgagcctaggaatttatccgtttcctccacatattccaatttattagcatataattgctcatagtagtcactaatgatcctttaaattcctgttgtatcagttgtaatgtcttcttttttctctctgattttatttgtttggatcgtctctttttttttttttcttagtctggctaaaggtttgccaattttgcttatctttaaaaaaaacaaacttctggttttgtttatcttttatgttttcttcatttcaatttcatttatttctgctctgatgtttatttttttcttctaataatttggggtttggtttgttctagcttttctaattttttaagatgcatcatcaggctgtttaagtttttctttttttgatataggcacttaaagctatatattttcctcttagtactgcttttgctgtatcttatgagttgtggtatgttgtgtttccattatcatttatttcaagaaatttttcagtttccttctttatttcttcattgacccactggtcattcaggagcatatgattcaattttcatgtttttttttttagtgtacaaaattcctgttgttactgatgggtagtttaatttcattgtggtcagagaatatgttttatattatttcaatttcaattgtttttgaatgttttaagacttgttttgtagcctgacatatggtctgtctgtgagaatgatgctgagttgaagaatttttattctgtagccattggatgaaacattctgtaaatatctattagatgcgtttgttctatagtctggattaagtctgatgtttctttggacagatttcccaggcagaaaatcaacaatgttgaaagtgggatgttgaaatctccagctactattgtactgaggtctgtctctctccttagctctaataatatttactttatatatctgggtgttcaagtgttgggtacatatctatttacaattgttatatcctcttgctgaattgacccatttgccattgtataacaatgttgtctcttcttatagtttttgtctttaaatttattttatgagatataactgtagctactcctgttcttttttggtttacattgccatgaaatattccatttatttgtttttagtctatgtgtatctttatagttgaagtatgttttttataagcagcagatcattgggtctttttttaaaaattcattcagccattctatgctttttgattacagagtttagttcatttacattttatgttgttattgacaagtaaggactttctgttgtttttctttgtcttgttgtactgtttgtgtcttaaaaagttgttgttatttttgactggttcatcatttagtcttttgacttaagataaacatagtttacacaccacaattacagtgttatagtattctgtgtttttcggtctgctttctactatctgatttttgtaccttcagatgatttcttattgcttattgtccttctctttcagattgaagaactcccattaacctttcttttagggcaggtctggtattgatgaaatccttcagcttttgtttgtctaggaaagtctttatttctccttcatgcttgaaggatattttcacagaatatactattccagggtaaaacgtttttatccttctgtactttaagtatgtcatgccactctcttctggccagtaaggtttctactgaaaagtctgcttacagatgcattaaagttctattgtgtgtgtgttttttttctcttgctgcttttaggattctttatctttgaatttgattattaaatgcctttaggtagtcttctttgggtaaaatctgcttggtgttctataaccttcttgtacttgaatatttatatatttctctaagtttggaagttcttttatattatcccattgaataaacttgctaccctcatctctttctctacttcctctttaaggccaagaactcttagatttgcccttttgaagctattttctagattctgtaggcttactttattattttttattcctttttattttgtctcctttgacagtatattaccaaggagcctgtcttcaagctcattaattctttctttttgttgagcagttatgttattaagagactctaagacattcttcaatacatcagttgcattttcaactatagaatttctgcttgattctttttaattatttcaatctctttgttaaatgtatctgatagaattctgaattcttctttgtgttatgttgaatttctttgagtttcctcgaaagagctattttgaattctctgcctgaaaggccacatatctctgtttctccaggattggtccctggtcccttatttagtttgtatggtgaggtcatgttttcctagatggtcttgatacttctggatgtttgtctgtgtctgggcattaaagagttgggtatttattgtagtcttctcagtctgagcttgtctatgctctatgctcattcttcttgggaaggctttctagatattcaaaagagacttgggttccaagccgagtaatacagactcataaagataccacctaggtggtcttagataaggtctggaagaattccctggattaccaggaagaaattctcgttatcttctgctactttcttttaaacaaatgaagtctttcttgctgtgctgaaccacctggagctggggatggcatgattcaagcacccctgtggccaccaccactgggactatcccaggtcagacctgaagccagcacagtactgagtctcacacaaggtccactatatttgctacctgactacgacctatattctctcaagattctagggatctacaatcagtaggtggggaagccacagattttgtcatttccttcagggcagtcagtttccccagaacccatgcaggtctagagatgctgtctgggagccagggattagaattaaaaaaaaaacttagaaatctacctggtgttctgttgcattgtggctaagctggtactcagaccataagacaaagctctttccattcttctttcccctttccacaggcagagaagcctttccctgttgccaccaccaccactagcccatagggagtttttccaggccaccactaagattcacttaaggcccaggggctcttcagtcagattgtggtcaatgctgccaggcctggggctcactcttcagggaagtgggctcccctttggcctagggcaggtctataagtgccatccaatagcctattcctggattcagggatccctaagagcccacttggtgctctgcgctactatggctgagctggtagctgaagccagcatgtctcagagtcttacccaaggccagtggtataccacctgagtattgctgttggtgattcagggttcgggggctctttagtcagaaggtgatgaattctgccagtacttgttcattcccttcaaggaagatgtttctcttctggccgagagtgtgtctagaaatgtcatctgggaggtagggcctaggatgcaggcctcactactctgcccactgatctaccctatgttggtttagctggcatccaaggtgcaagacaaagtctctttgctcttctgtctcctctcctcaagtagaaggaaggagtccttttattgctgcaagctttcctgcctgtggttgtgggaggagttgcacaagcactcccctagctggcccatctggtgtctttctaggccatgtgccaccccaatccactggctctaagtccagcacagcatcaggacttccctaagaattgcagtccttgtgtcctcgactgcctttcaagttcacctaggatcccagagcagtttagcctgcagtagcaagacttgcagagaaactcaggttcagaccattgagatgggcacttcctctctggttaggtctggtccaaatgctcccttcatgtgtgggcactggctgagttcatcacgcttttgctttccactgtgacagggcaaaactcagttcaatgcaaagtcccccagtcactgtgctctccctcccccaagtgtacagattctctttctatgccatgtaattatttctggggaatgtgagaggggtggtctcagtgatttaagcctgtctttcctacccatttagttcctctgtcagcaatataaaccaggtactgtgattgcttacctgatttttgttttttatgaaggtgcttttattgtgtgtagtcagttgttaaaatgtggtgttccttttaggtgagacaatttgtggagacttttatttggccatcttgctccaccctcagcataatattttcaagattcatctatgtcgtagcatatgtcagaactccattccttttcatggctgaatgacattctattgtatgtatataccacattttgtttatccatttacctgttgattgactcttgggttgtttttaacttttgcctattgtgaattatccagcaatgataaaaatatctgtatgagtccctgttttttattatgtatatgcctacaaatggaattcttgggtcatataggcctagtgggattttatttctgattatactgagtttatagaaaaatctgcagtgaattcgtatcttaaattttaacctcaagtcgtctgatccatgagcactgtatatctctgtcttagtcagcttgggatgccataacaaaatatcatagactgggtagctgaaataatagaaatttattttctcatagttacggatgttgggaagtccaagataaaggtgctgggaaggtaagttttattttgaagtcccttctcttagcttgcaggtggccaccatctcactgtgtgctcacatgacctctttgtgtacacacacacacacacacacacacatacacacacacacacacacacacggagagagagatggcacgctctctggtgtttcttcttataaagacactaattaattatgagggcccatcctcatggcctcatgtaaacctaattacctatcaaagtacccatttataatactgtcacattgagggtttcaacatataaactgaagtagagaaggggacaaaattcactccatagaaatatccttatttaatttttctttaatttttcttggtaataatttgtaatttttaatgaactgcctgtgcccacctgttgttagatttaatccttagttttacatgatttttgatgctgttgtgaatatattttgttttatttccaattgcctattgttaatatatagaaatacaaatggttgttttctattgaacttgtatcctgcaatcttgctcaattaacttattagatttagtggctttttgtagatttttaagattttctacatgcacaatacactctttctgaataaagacagttttatttcttcctgtcttccttatgtgtcattttttctttttgctttattgaactgggacttgcagtataatgttcaataagagcaatgagagtagacattcttgcctcatccccaaccttgtcaggagagcataagagcttaggacattgtatttgcatttgtatatttgtaactaagcaaggcactgtgatcagtttattggctacagtttttttccttactcagattctgtaatcactggttatagtagctttaggcactttaactctgtttcaattagagaagttcttatttatctataattttatatatttagctgctgcatatttttttcagattccatagcttaaaatcattttaaaattactggtataatgtcatgctattgacttttattaaagttcaaagcagccactgaacctcactgatgaaaacactgtgtattatggaacttaatttttcttggggaagggccatgagagaaattcctactgaaattttagtactaaggctacactgagtatcagcatataaaaatatagaccatacactttccctctaacataatgagattttaaaaatcaactctgtttccatttttgctttagtagaagttcacagttaaatgttttgcataattgtggccatcatgatttttttatttgcatccttttttcccagtatttgcatatgttttggtttattttaacaatcttaatctatttatgtcttttgttgtaagtcgactcaaatcctttttaaaaaggtttagattaaaaattataatctctttgaattaataaaaaagctatttcataaaaggccctaccttttaagtaattaatttgtgtaaatacctacttttaagaggcttaatggaaagctataaatggaaagtctctaggcttcggaacacagtcttttactggccttgtaagataagctgctaaagagaaacaattggagtgatgatcttgttgaagtgaagcaaaaatgcttctgactaaaacaaagcgaaacaacaaacagagatttgctgtttccttcaatgattaaagagaaatgattgaatgtcctgaaaataacctagtaagtggaacagtaaagattcacatgtctcaggtttctgggtggtatggcaacaagaagttgtgaggttactgccagtcatttcagtctatcttgtgctggaggaaatggcttattttgtatcacaataattagaataatataaaaaatttaatccacatagcaattattagttaatatttgtactacctaattacacaaatgtacattttacatttacattatacattttaattcttattgtaaattgtcttaagttaaactatatataatgatgattttaaaaataaagaattgacttctctaacaccctaaatgtttaatttttatatgtaattatttggagaaaaaagcaacatttatttttaaaacatttctattgtgtttagtattaaaatgtgcttttaatgtttgagagaaatgctttgtgccaaattcaatgccaagtacttgaaatgcattattttatatttttcacaacaatgctattgtagcaatttcacttatgcccatttacagatgagaaatggaggcttggaaaagtttattaagttgcccaaggtcacacagtaaaaggcagaaccaggatttaaaccatggctgtcttaagtagcatctccattggaaagcatttgtctgtaagtaacggtaacgtcaacaatcttttattcccacatcaagctatctgaaaacaggggattgtttgcataggtttagttgcttaataatcctgtttaatcctctgttccaccattcccattgagtttgtttttcattttcatgctttttatttcacggttgcaaaatacataatgcaagcctaggtattgtatgttcaggacatgatgaagggagaagtgacaatgccagccatatttctcctttttttttttttaatcatgaaagcaaaatcttttcagggaaccctctggtgggttttgcttgtatctcatcagccagaactgtgtccagggcaatgcttagctgcaagagaagcaggaaaaataagtatttagtgttcctagccacagaagaaggtggctggggcctgggaatgagtatggttggccaaacaacagtgtctgaggcaatggatattaaataatgctgattctcttaggttagcactagtggaatatatgtatgaattttaaaggcaatgactgaaatggagacagtaaaggagaatattttacttctctttaaggttttaatccaattttccgcccgagggcttcggggtgcttttctctgccttcctatcccccattttttttttgagtcagggtcttgctctgtcacccaggctggagtgcagtggctcactgcaacctctacctcctgggctcaggtgatcctcccacctcagtctctggagtagctgggaccacaggcacgcaccaccatgcctggctatttatttttatttttatttattttctgtacattttgtaaagatggggttttgccatgttgcccaggctggtctcaaacatctgggttcaagcaatctgcctgccttggcctcccaaagtgctgggatcataggcatgagccaccgtgcccagcccccagtagcccatttttgcagtgctatattatctttcctgaacatgcccttgaagtggatacagtagtgcgtgtcagggtgagaggatggcaagaaagaggaacaagaacctgacccctgctctagtttaggatttagtggaaggcaaggcaaacgtatagttgaaagggtacaggacactgtgattagaggtgcagatttcagcttattttcaaagttataaaaaggagataagcttgaataatcaggcattgttaatagaatttaagctggcaagctttgaagcagagttatgatttattatcttgttaacctttaacttaataatcagaataatttaaaagataagaaaaaagtttaaaaaaacagattcagtgataaaagattaagagaatttaggaaatttaacggaaaataataactgttagtaaagttataacttgtattggttaattaatgtacttaggtttgatttattgtaccctaagagcctctatgggatctctgtacttaggaaggttaatattaataaggataatgaccaaatgaccatcatcatgtctggtccctctggaaatttttacagatgggatatagttttatatgtttgggagaagtttagtgaggtcattctttcattcaaacaatcatatattaatgcatagtctgtgccaggaaatacatttggccccagtactatagaagtcacagttcttattctcaggagcttgtgatctaggagggagtttgtcttccattacccatttgactctctcactttatggacctactggtcctacctaaatgccaaagccaacttgactatttgagtgaattcactggtcaaattggacagaaatgcaaaatgaacagttaataagaatattcaggttgcatgtatatagtttgtatgttcctgttatccaaaataaaatgtagaattacttacatcaactaaaattctgctcttccttactgtacatactaagaactcattgcataatgctgttgaatttgacaaaaatctgggaattactaactcaaaaaaatatggctttgctggcagaaaaatgatttgtacaagaacacccaatagagtacctagcacataataggcacataattaataattttacaagcaaatgctgctgaatgaaagcaaatgaatcaccatgtctctgtagattattttacaagagttagtaggacttttataactaaattctatcacttatgaaaataggagacattttagaaaagtagtttgtgttggttacttaagtcaagttaggttcaaattattgtgccttaagtgcttctatagcaattttgctggaaatatgtaaagtggtgcatgaaagttttctcatggtatatctaaatcctctgtttaactgacaagttcttttgatgtcctttgcacaaaatgacgcacgtcatttcgcatgaagggtgatgtgctagctggcaattgtttgcttcctgcagggttttgatggaagtgttttgtgatagtagcttgatatatattcctgacttttagtttgaaaagctcagtgcatctgtgttgtcattttttttttttaaacgaagagctttagtgtctttaattttgaaacacccaaattttaaatctctgtgccaagatggagaggaccattcattaatgtagttttctgcagtgtcattttctttaaatcacaagattatttccacacacatgctaattttaaaattggaatgagtacctactcccataggtatagagaagaaacctatttattttaggtgttgtaatttgataagaagttagtttaactctctggctgttgagtaatttataatcatgctttgtctgctcaggtacatgtgttggagataaaactgtaaacaagaaggccgggcgccgtggctcacgcctgtaatcccagcactttgggaggccgaggcgggcgaatcacgaggtcaggagatcgagaccatcctggctaacatggtgaaaccccatctctactaaaaaaaatacaaaaaattagccgggcgtggtggcaggcacctatactcccaggtactcgggaggctgaggcaggagaatggcgtgaacctgggaggcggagcttgcagtaagccgagattgcaccactgcactccagcctggacgagagagcgagactctgtctcaaaaaacaaacaaacaaaaaacaaaaaaaaaaactgtgaacaagatatgcttcttgtccttaaagaacgtaacacttaatatacaaatattgtggtaggtgttgctataggagaaaacagagtttggtggatgccgagcaggaggtacatgagctagtgggatgagagtcaaggagacattgggtgtttgtgtgggagcagccacatagtgaaatcactttcagatctctaccagcacgtctccttaggtgtttgagatctgaagtcactttcagatctcaaaaagaaaagttttttacacgactaaaagctataacacctttatattaaatcagattccaaatatggaaatgatttagaatattgagaggtagcctgatggagtagtgcttgaaagctcagactctggagccagactcataggttcaaattctgactttgccatttattgattctagggatttaggcaagatacttcttttacgcgcagttttcccatttgaaaaatagggatgatattacctaactcataaggttgttatgaggattagatgaattaatatttattaaaaaagcttgaaacattgcctgatgtagcaagtgctatatcaatgtttgttaaataaatattgtcatacaaatatagaagcacttaaacacaattaaacattttcctgttgtctttgatatgacttatgtcttctgtacttttctaagtcaatggaggtaattctagtggcctgaagctcatgttaaatggtgttgggaaatgggttaaacattgattcactatgatctagtctcctctactgagaggaaattatttctgtatattaatgtatatggatattttctatacatttgtgtatattaataattttgaacatttttcaagaggtctgagtaacaaatataaaagtgcatagcttctcagagaccactacatttatgataacagaaacagacattattatgaagaaaagaaaagtaaaaataatttgggctttagtaactttaagcatcagttaacttctttagttgtatttaggatgtactctaactataagaattaattcaaccataataaaatatgacataaggataaaaagaattttctttctcttgattactaaagcaggttatgataataaaagtgacttgggattacagcctgtgtgtggtgactcaagcctgtaatcccagcactttgggaggcagaggcaggaggatcatttgagcttagaagtttgagaccagggttgaaagaccctgtctctacaaaaaatgttttaaaaaaattagtcaggggtggtggcacatgcttttagtcccagctactcaggaagttgaggtggaaggatcacttgagcccaggaagtgtggaggctgcagagactgatgattgtaccactggactccagctgggacaatagaacaagaccctgtctaaaaaaaaaaatgacttgaatttttgaatttttatacatttaaccctcatgaaaaaggaattatatatttttgaaaaggtgattagaatattttaacaatcttttagtagttctgcttcagttactgctatgatttaaatgtcccctccaaaacttatgttgaaacttaatccccagtatgtcactattgagaggtggggcctttaagatgtgattggatagtgaggaacctgcctttattaactgattaatgtattcatggcttaatagataaatgggttgtcatcagaagtgactggtggttttatcagaagaggaagagagacctgagtaagcatgctcagtttcctccccatgtgatgccctgccctgcactgccttgagaccccacagagaatccctgccagcaagatggctctcaccagacatggtcccttgactttggagacttctcggcctccataactgtaagaaataaattattttccatataaattaaccagtttcaggtattctgttataagcaacagaaagtggactcagatagttactaataaactcaaattgtaattttgcttctcagatctttaaaatacataagagaaaaacatttagtttgagatcataataaattaatgagttttctctttttattttttatcattctgtccagtggcgaagttattaatgataaccagatactttagtttgaggttgagctgattttaatttgtggatgttaatccaaaagttgccaacagaaagacattctgtgactaattcaagctattgagcatagggccttataccctgtggaaaaagacatgatgtgggcttcatgcacgtgacaaggaaatgggaaatattaatatatataaagttggccaaaatatgctaaaattgtttgcttgtgcttcttaaaactctcatttgtgtcaataagctcagtaaatgatctctaaaagcttttcttctacttcatgcatgtgtgtgtgtgttgtgtgtgtgtgtggtggaagaatttattggaaactgggagtataattatcaggaaacttttaattacataaaatgaggcatatgcaggtatatatcacatgaaccaaaaggtgcatccgcctgaaaggtctaaaatcattttcagaaccaaacaggttataattcttactcctaagtaaaatggtaaaaataacagaattattcaattttagggttatcttttcaaggcaataacttcataaaaaagaaacttgattccatagataatagggagtcataatgtattactgagtagggtaatgacaaaatctatattaggcagggttctctagagtgacagaactaataggacatatttatatctatatataaaggggagtttattaagtagtattaactcacatgatcacaaggtcccacaataggctgtctgcaagctgaggagcaaggaagccagtccgagtcccaaagctgaagaatttggagtctggtgttcaagggcaggaagcatctagcacgggagaaagatataggctgggaggctaggccagtctagcttttcacatttttctgcccactttatattctgactgtgctggcagctaattaggtgaacccctgattgagggtgggtctgcctttcccagcccactgattcaaatgttaatctcctttggcaacatcctcacagacacacccaggatccatactttgagtccttcaatcccatcaagttgacactcaatattaaccatcacaagtccacccttgccaacttgaacccatacacatcctgagatcatatgtaatcttcaaataaagacaataataaggtcataattatgcctaacataatacaactatccttcatgcaactggaaacacaccaatccccaagccaaatgctattccatagagttaacaatacttaaatactgatatggatatgaagtcaataaatcttatgtcacatgataaaggaaaaaggaaataaaatgaagatattttcttggtacaaatgaagatattttctgtatacctgaacaaacatgtttttagcaaaaggaggaggaaatactcatgacaattacagtccttgtttctgcagttggtcacgtggtcatagctggtattgatgactacactcttctcctacccattctgtattccctttgcctttagcaagcaccttagcaggccgtgggtttttttcctggtggagtgacccaaacctttattcctgaagtgtctgggtcatttgtagtcctgcctggattgggctattgtagtttcccattaaccttaatcagagggcatggtaatactaagagatgccctaatggatctcctgtattccacgcatacccttccttacctccgttgtggagtagtagactggtttcatcttgatagtctgggtcagtcaccccagccaacattgtaactcccttcttagcctgttgacttaaaggtaggaggaaccccaagtgtccaggtagcaaaaattttgctagtgggtcactaggggtgataataagaggtgccacttccacttccacccctgattcctggactctgcatatcctggctatgggaaaagcagtaccgtatattggaagctggctcagagcatacacagccttctggagaactttgccccagccctgcaaagtattgtcacttagttggcattttaattctgacttccaaaggcaattctattatcctttcaatccagatgcttcaggatggccttttgatggcaccactcaccattactcctagtgacccactagcaaaattttgcttcctgttcccacaatattatgttctgctggcctagaagtcttagttccagagggaggaacaccaggagacacaacaatgattcctttgaactggaagttaagattgccacctggacactttgggctcctcctacctttaagtcaacaggctaagaagggggttacagtgctgtctggggtgattgacccagactatcaagacgaaatcagtctactactacacaacagaggtaaggaagggtatgcagggaatataggagattcattagggcatctcttagtattaccatgccctgtgattaaggtcaatgggaaactacagcagcccaatccaggcaggactgcagatggctcagacccttcaggaatgaaggtttgggtcactccaggaaaaaaaccatgacctgctgaggtgcttgctaaaggcaaagggaatacagaatgggtagtagaagaaggtagtcatcaataccagctatgaccacgtgaccagttgcagaaatgaggactgtaattgtcatatttcttccttctttgttaaaaacatgtttgtgcatgtacacacttgtactaagaaaatatcttcatttcctttttcctttatcatgtgacataagatttattgacctcatatccatgtcagtatttaagtattgttaactctatggaatagcatttgggttggggattggtgcgtttctagttgtataaaggatagttgtattatattaggtgtaattatgacctcattattgtctttatttgaagattatgtatgatctcaggagacgtgtataggttcaagttgtcaaggggtggacttgtgatagttaatactgagtgtcaacttgattggattgaaggactcaaagtattgatcctgggtgtgtctgtgagggtgttgccaaaggagattaacatttgagtcagtgggctgggaaaggcagacccaccctaatctggataggcaccatctaatcagctgccagcatggccagaatataaagtgggcagaaaagcatgaaaaggttagactggcttagcctcccagcctacatctttctcctttactggatgctccctgcccttgaacgtcggactgcaaattcttcagctttgggactcagactggcttccttgctcctcagcttgcagacagcctattgtgggaccttgtgatcatgtgagttaatactacttaataaactccctagatagataaatagatagatatagatatagatatagatatagatgtatttatcctattagttttgtcactctagagaaccccgactaataagatgcagtatttatttgtcttccctctgtcaaaccttgagccaaccacttttctcagattgcctgagaaaggtatagggaaaagaacatacaagatagatgagacatggaggaaagaactattaatggtggggacagcttctttacatggtgaagaggatgagaaaagccacccttaggccaaagaactccatggcctctaagagggtgctatggtttaaatattttttccctccaaagttgaaacttaatacccagtgtgtcggtattgagaagtagggactttaagaggtgattggctcatgagagatctgtccataggaatagattagtctatccatggattaatgagttaatggattaactggtggcattataagaagaggaagagtgacttgagctagcactttagcatgctcaacttcctcgctatgtgataccatgcactaccttaggactgtagagagtgtccaccagatatggtctcttaactttggactcaagttctccttaaactgtaagaaataaattatttaaaaataaattacccattttcagatgttctaagcagcaaaaaactgacatatatagagtgcaaagccccagaatggcataggagaagacttgttgcttcagacagggttcttggcataatcaatggtgaggctcccaaacacagctgcaattttagccccagagccagctgtcctgactttggaagtcctagccccaatgaacttggctgctatgccaatatcccttgaagtggtgctggtttggaagctgtgactagggttaagtgaggtcgggggatgtggggctgccaaactgctgaagctctcatctgttagtgtctctggttgcttgagaactactgcagagagtggtgggcttagcacctgacaggtgctctcaaacagagaaaggtgggaacacacttggcacaggtgtacattttcaggggtgaaagactggggcaagggagcttccctagtgcagagaaggttgagagaggcaatgactggcacttttaaaagtagtttttaaagtagttgtgatttagtgtgcatgaccaattgtaaggaaacaaaattgagacaataaaccttttggggaggttgttttagagattcatgtatgagaaatgacagcttagttagtatggcccactgggaatgaaagaaaggtaatagttcaagagaaattctgaagaactatcgccaaggttaaggagctgaggaggtggtatcttccaagggcgaatgcctagtagtttgttgtactatttgagaatataaatagttaagagttacatttaaaactgatgattgaaaagttaaagtttggagaacctttcaagacagaatcaaggacagaggcaagaattaagctttgagtaaaagttctaaagaaacaaaggtgaagaaactctagattcaagtaaatattaaaaccattagttactgtcatctgaagaaaatcaagagaaagcaggccagctgctgtggggatggatccacttgaatgaaaccaaaatatcttgttaccatgaagctaaaaatgatacaaactaatactgaaattcatagctgaaagaatcatttccattaggtgttgacttgtttatcgttaatttttttctgaccagaatgtaagctccatgagagtaggtgccatgtctgttttatttgtggttatatgttcagtagttagacaagggattgataaatatttgttgaatgaataaatgaataaacccttgcatactctgaccttaagtgggagataaagtctgcccaagtccaagaacaatgtttgcccaaattgagaacaaaatggaatcctagggcacactgtccagtagcgcatgatgaaaatattctgtatactagccacatatggctatggagcagttgaaatgtggcttgtacatctgaggaactaattgccacatgcagcttgtggctactgtattgggcaatgcagatgtgtataatgacttcaccagttaggaaacctgcctcttctgggcagatgtaacctgtgccagggcagtggctttgccaggggccagaagcagtgtgggacttgggaaggaaataacggattcactgctggggctggttttattaatccttagcccaagggataggagctgtctgccaagcttatgtgagatccaggttacttcaccagggaaagagagcagagaggtgtttgggtccaaagccctagttagcagtaaaaatgagtttactctgaaggtctttgtgaaaatacctgttagagaactagaggctttcatagatgactagaaaaacttcaagatttagggattctggtcacctttctttgtaccacatgaacgataattgcattcgatcattaaaagacggactaggctcatataaatgcttaacaaacactcaagacacccaggaattcacagttgaggaaagcaacgtctttcaatactgtaagtatagcagatactaaaaaatacttctatgtatttagctatgtattaaattagatgaacatttatatttatcatgtgtatctaatttttattagattttgaaatgttatactgtggtttttgttttagcagatttacctggttatagcttgcttaggcaagtattagaattattctgatttccttgagctccctgcagcttggccgggagagaaggagggaattgttcaggagtgtgctaaattggctttgtatttagaattcacccagtgataatacatatcaatatcatgtattgagctgcatgtgggagcagatgtttggcatgtgtcaggctacttctgggaatagtctgtattgaagaaaggaaagtatgcttcagatctttacacataatttatgcaagtgaataaggatttctcacaaaggaagaatgccagacagactattatatttagcaagataaagtgtgctgtgtgcaaattcccaaagtcggccagtatagcagaggacaaagaaatattaataaattcctgttttataggagattagttctctaacgagcaaacaagcaagaaaataggggagtctcttagggttttctgaagattggttcacctcccttaggctaaccatttgttttcattgtctttatgagagaaagtcttttgtaaggatttaatgtgcaccacaggaaaatgtttacatattggaatcttaaggtttggagggactttcaaagatcatctaatcctgccacctatctaacacttgacttggttttgcaaaagtcttaccaagggtcatccaatcagggtttcagcatcttcaggagagagagtgatcagtagctcccaagctgagccattctgtccttagaggactttgacaccaaggtacccttagagagtctaatacatctgtcctacttgtaaccactggggtcaaacacaacacctctaattctttttcccagtgaagttattaggatatttgagcatgctgatcagatctccagggtaaatatgctcaagtacttcgaggaattcttggatattattgatttgattgtttgtacatctcaggtcatgcttgaatgtgctcagtttctccatgcttgtattgcagtacttcatgggttgtccaggctatatagagataagtggggcttttgcttccttttatacagattctcttctccttttcctctccttcctctcctctcctgtcttttcctcccctccgcttccctactctttttctccttccctcctctcccctcctataatacattacatttattcattcactcaaaaatattccatttactgttgattcacattaacctttctgtagactaaaatctctaagtcttagttgcctgtattgctactatgccacatctccattctgtacaaaacaattgtccttttggacttaatcacatcattttacatttacttctatttcttttcaatttatttctattattacttttcatttgtggatacttcatttctataagtactttaaaatttatttttattaatttaagatatagtccttgtctccaacctgtcagcttccaaccccattcagtcatccacatggccactctcccttctacaaattttatgatgtccgctctattttcttccaggacattgagtaacatggtgaaacaaatggaacccagaaaagaattctatgattctgagatttagaactaggttgatgctgatgcactagttaacaccgtttgaatatagctgttgaaactgttactgatctgcctcacagtctgggcactcagctcctgtaatccattttatctacaagattaagttaaaagaccttcttctgttctctttggaggtgatgtgtgctaggttatcttcaatttctgtaatcttaggaattatatcaaagaaggaaagggcatttgatgattcttatttccttctccagatattgtgttgtcctctctttagcatatttcttagacaagcagtaccctttgattctctaacagacacgtaggactgagaggagggtaccagaaacaaactgaatattcaggtaattactataaattgtgatgcattttatggtagcacaaaacataacaagttgctttgccatatcaaatgaaatccactattttctagtcagcagagaacttgaaataattgatgtttttgttaaaacaaatcagaacctctgaaccatggctaattcttatttctgaaggtttttcttgtattttcaaagaactgaaaatatttaaaatttttagccacatcagtgtcatgaaaattcaggagatttatatacattttggtgaaaatgaggaggcacacgaagaatccctcagtaaaaataaaacccttgcagcaaggtgtatgctaataagtcagttggatacaacagtgatggacagaattgaaaaatttcaaatcagtctttatcttcttatgtggaaaataggtgttgcattcattatgcaactaaatcaaggtaaaatctgtaaaaaaaaaaaaataatgaaaataaaaccccaaccccctgtcatctctatagtaaaacaggaactagtttcctataaagacatggctgcttccttctccttcaagtcgacagatactctctatgaccagtgtgactgtttctaagttgtcattattcaggtgactgagttttatattaaattttattccacatgtgcagtcatttaaattatgtagacattttaataaaatcagtgttatccttttggaaacataagaccattttttgttaaatttcatgatactttgtattttcgttttttttgttgttgttgttgttttgagacagagtctcgctctgttgcccaggctggagtgcagtggcgccatctcggttcactgcaagctccgcctcctaggttcaagcgattgtcctgcctcagcctcccgagtagctgggaccacagatgcccaccaccatgctcagctaattttttgtatttttagtagagacgggtttcaccatattagccaggatgatcttaatatcctgatcttgtgatccgcccccttcggcctcccaaagtgctgggattataggcgtgagccactgcgcccggccaatactttgtatgttccattctccaattggaagcataaaaatttaagaacatcgtagttttaaaaagagtattatgataaagctttaatttctgattttagaaaggaattcaatatggaccaggaccagaagaggtatctaaggtttgaaaatatattttttgaagtatagatttcattgatagtttatgtgtgtgtttccagtatagtgagaaaatgagaaagtcatccatatccatgtgtttttcaacttcattatcactacaatttgtaactatttggaccttgaagaaatgtccttggcagtccctgatttcatgtttgtttgtccatctgggttgagccctggttagaaaattaataataattaaattaatattaacataagtaataataaagagaggactgggtggtcatgaggtaggcaggagttaaaatgaaattttcttagttgaaagtttgtaaaaacagctatgtattatctcaacacttcattagagatttacattcttagaatttttagaagctgaaataagtattttattttcttgttataattaactcatgtgcatggagactaccggagataattattgaagttattagaaattctgagctcccaaataaaactgtcataagatcttgtcctgttctgtgatggcttacagaattaatgcatttcctatgggcaggagtgttagcataaagttgagggtaggcgcatgccttccccaccttcatccaagattcccagagtgaaggcaaatgggagtggccataaacttgataagacaaacagattatacaaaatctactttctttgttttgaaacaaattacaaactgcaatttaaaactcaagacggaaaatagaagcctactagggccacgtcctggtaacatatgtgaccttcatcatcctcccttctccctgaaatgtaaatcatgttttgtctccctaaataatcctcaaatctcaagattggaattcatgtttaagaagaaaaacctatcttggtctaacagcttgacaccttccttctaactgtgctatactctcctttgatctgattgactgatgtgttctggtcatgaacatgaccagttcatgtgggtaagtgctattcagtgggagaagtcttcttctaagtttagagggtgggtgctcttacaccaagaggaaatattttttgtttcataaacagtctatggaattaggtggttgattatgatattgggttatattcttgttctaagaatggggattccaacctatgagccctctcagctttgaggcatctgaactttgagtcccacttgcagctgtcacattgactaagttagtggttttttttttttttttttttttttttttttttgagacaagagtctcgctctgtcacccaggctggagcgcagtggcgcgattttggctcactgcaagctccgcctcccgagttcacgacattctcctgcctcagcctcctgagaagctgggactacaggtgcctgccaccatgactggccaattttttaaaatatttttagtagagacaggatttcaccgtgttagccaggatggtctcaatctcctgacctcgtgatctgcccatctagcctcccaaagtgctgggattaattataggtgtgagccactgtggccagccaagttagtggtttttaatcagaattgcacatcacaataacctgggaagcaagcccacacttatatctccagctaccttatttcatcagttccagtatgtacttttttccccatattttctcatttttgaaatctggatgtgctttacattagtttgatcaaacttttttaagataaattttattgtgcatatgtgaggcttacaacgtgatgttatgggatacatgtagacagtaaggtgtttactatagtgaagcaaactaacatatctatcatctcatggagttacttttttgatgacaaaagcaggcaactaaatctacttatttaacgcaaatgcccaatacaatacaattttattaactacaggttgtgtatcttttatccaaaatacttgaggccagaagtgtttcagatttgggcctttttctgtattttggaatatttacacatacatagtgagatatctgggggatgggatccaagcctaaacacaaaatttatgttttattacaccgtatacatatagcctaaaagtaatttttattcaatatcttaaataattttgttcatgaaacaaagtttgtgtatgttgaatgatcagaaggcagtgttgccactatctcaggtacctgtgtagcatcatgtctgtgctcagaaagttccagattttggagcattttggattttagatctttggattagggatactcaacctacataatcctcatgttgttcattatatttctggacctgtgcatcctagttaactgctactctctctgtatagttgacgttttttatttagactccacatataagagagattatgcagtatttttctatgtttcatttatttcactgagaataatcatgggttaatttctgccttatctttcttagtgatacataaaataatggtgtatcttatgatcaatggcatcttagaatcaatgaaatattgattgcatcaacatctctgagggggatggtgtctcactgtgtgaattttacaaaagccctacagttgagtctgatgcacaccattggttataaatatgttgacctagatcttggcatatttttaaaattaacaacaataataaacttatcactgacattcattggtttctctcttgccaggacctgggctaagcactttctatacttttaatcttatttaattatcccaaccaacctattggatagatgttattatccctactatatggattaagatacaggcttggagacatgaagtaacctgtccaaggacatgtatgtattagtagaagagcaagtacatgagcccaggtgggtttcactccaaagctctaaccactattttatacagcaaagcaatggtttgtaaagtgtggtctgcagaccagcagcatcagcatcctctggggatgtgttagaaatgcaaattttggggccctactgcagacctaaggtatgagaaactctgagagtggggcccagtaatgtgtttttacaagcttttccaggtgtttctggtgcatcctaaactattagacctattaagaccactgttgtacagcatacaatgctcctgcaataggaatacaagacatagctaataaagataggacctaataaagtttattggatagctgtctggctcatattgtaatcttaagataatgccatatttgcaaggttgactaagcttttagttgcttaataacaaataaaattgcatttgctcaaatgtgctttaattatagttcccagtaggcagaactatggtaactaaatatactaggctctaatggtttttgcataatgagcatagtcaaagcacttagcatgaatggattacaattccccatactagttgggagagctttagaaggaccacatgcttttctttggtttgacatcctcttgtcctcaatcttagtctaatcctattatttcttttcttttaaagcacaaaatacggcatctttgttcctaagaggaaaggatgaactgacaatatccttccttgtattatcctggtttgatagattggttaaatctagcatttgtaatgcagatagaaataaacagtttctgaacaaaagctgattaaagaatttagttgaaaaaataaagaacctgcttgcttagttaaaaaaaaaaggtgattgacattaaggaattaagcatccccaaaggataactaaatttgattccgagaagagaaaaggcagtgtaaaaaataatataccaaagtgacagtgtagagatgcctggtgaatatgattgtgtctactcaacatcagtacaactatttgaaaagcacaacattcaaatagtaatttttttgctctgcatgatgcaaaataagcaatttgatttttcttttttcaccaaattgactggttcttgaatgtgttatttgacccacagtactgtattatccacagcatttcccagatgactgaactaagtagatgtcttattgttgttttttcctaatagacatgtatggggatgaagatagtggtaattggaaaaggggaaagcatagcatttggaacttggaagtggaaattttagaagcatgagcactactcagcctagggacctgttattcggctacagtgacctgcagaccctgtctctacctccacggaattgtgcacacttattagtgcagattggtgtcttataaatacggcaaagggattgaaggccttgttgcagatcttgaaatgctttctttgtgatacctgtttctgatgtgtggcttgaatttcaaaatgttacctgatttatacccaaaagctatttcctcctgggtctttctgccttgaataaatctttggacttttgccttatacacccggatcttattgctgcctgtgctcctgttgctatttggtctctatactgggagtccaaaccacctgtccaaactcaaaacctgccgacaacctccattttaactaatctcttataaatggatattagttctcctcatggactcatagccctcctagaagattcagctaagttccttgatgaaggtggctaccattgtagtgtaatagttaagtgcattcataagactgacctttaattgaagcccctatcaacaattcagtgattgtgaaatctggagtaactttctgggcttcagtttccttatctactttatattcagtgagatgtatatgaatatatttgaatgagtgaaacactgacgaacataaaataggatatgtttaaggcagttagcaaagcctaatgcaaggatagagttcaacatgtttttaccattgttattattatttccctcctattctttggttatttgtttttaacattgttaccacccagtccctgtatatataaactggcctggatctctaaaaattgtgtgtttatgatgtacaacatgatgtttatatgtacaggctcacctcactttattgtactttacagatagtgtttttttttttttttttttttttttttacaaattgaaattttgtggcaaccctacattgagcaagtctattggtgacatttttccaacagcgtgtgttcacttagtatctctgtgtcacattttggtaattttcccgatatttcaaattatttttactattattatatctgttatggtgatctttgatgttactattgtgattgtttagacagtgaacttgattgaaaaatgttatatattttcttactgctacactgaccaggcattccctcatctctgtccctctctttggacctccctatgccctgagacacaacaatattggaattaggtcaattaataaccctacagtggtccctatgttatcaagtggaaggaagattcatacctctgtctttcaattaaaagctagaaatgatgaagcttggtgaggaaagcaggtcgaaagctgagacagactgaaagctaagcctcttatgccaaacagccaaattgtgaatgcaactggaaagttcttgaagggaattgaaaatgctactccagtgaacacatgaatgataagaaagcaaaacagccttactgctgatatagagaaagtttttgtggtttggatagaagatcaaaccagccacaacattcccataagccaaaacctaatccagagcaaggccctgactctcctcaattttataaaggaagggagagaggtgaagaagctgcagaaaaagaatctgaggtttcaggaaagaagctgtttccataaccagaaatgccaggtaaagcagaaggtgctaatgtagaagctgaagcaacttatctaggagatttagtgaagagcattgatgaaggtggctatgttaaacaagaggttttcaatgtagacaaagcagccttctattggaagatgttgtctaggactttgatagctagggaggagaagtcaatgctggcttcacaggacaggctgaccctcctgttaggtgctagtgcagctgatgactttaagtggaagccaatgctcatttaccatcttgaaaaccctagggcccttaagaagtatgttaaatctactctgcttatgccctataattagaataaaacttggattacagtacatgtctttatagcatggtttaatgaatattttgtgctcactcttaagacctgctgctcagaaaaaaaaaagattcctttcaagatagtactgctcattgagaacacacctagtcttccaagggctcagatggacatacacaaggaaattaatgtttttatgacaactaacacaacatccattctgcagcccatggatcaaggagtaacttaacctctcaagtctcattatttaggaaatacatttttttaaggttataggtttcctagatagcgatacctgtatgtatccgggcaaagtaaatgaagactcctggaaaaaattcatcattctaaatgccagtaagaacatttgtgattcatgggaggaggtaaaaatagcaacattaacaggaagtttggaagaagttgatgccaacccttagggatggctttgaggggttcaagactgtagtagaggaaataactgcagatgtggtggaaataagaagagaactagaattagaagtggaatttgatgatgtgactgaattgcttcaatctcataaaacttgaatggatgaagagttatttcttatggatgagcaaagaaagtaatttcttgaggtggaatctactcctggtgaagatgctgtgaacattgttgaaataacaaaggatttagaatattacataaacttagttgatgaagcagtggcagggtctgaaaggagtgattccaattttgaaagaacttttactgtgggtaaaatgctgtaacagcatcacatgctaccaagaaatttcttgtgaaaggaagagtcagtcaatgaagtaagttttattgttgttttattttacaaaattgccacagccactccatttatcagcaaccaccaccctgatcagtcagcagccatcaacattggggcaagaccctccaccagcaaaaatattatgcttttctgaaggttcagatgattctttgcatttttagcaataaaatattttaaagttaatgtgtgtacattttttgatacagtgctgttgcatactcagtggaatacaatatagcctaaacattacttttatatgcactaggaaataaaaaagttcacatgactcactttattgcaatattcacttaattgcagtggtctgaaatagaacctgtgacatctctgagctatgcctgtatacattgtggggtgactaaatcaagctatttaacatatgcattcccttatacacttaacagtttccctgttggctagtctaggctacttccatcccacaaccatccatatcctgccatttataagaccaatgcaaattagtatgaatcaaataatttctttagagagtttattattatctgctaaagcttatcagcattgagcctttgaatcaaatggtttccttaatcttatgcaataagaaaaagctttttaggagtgtttctcctaaaattttgtgatgatttttatggaagaaactgtatcaaaatacaaatgtttaattccgtggttctgacttcctaagttgagtaaatagcagaactcaggtaatactaaagcttaaccatttaatgcttaggattgcttccttgttaattagggtaactttatagacataatcattggtttggtttcaaacttggctgttgcttggccttacagcagcagtcaactaatctaagcaatttaccattcttataacaaggatgcagaggaagaggcaaaagtacttaagtgggtttggaaatcattgcagttaagacttgatggagtcagatgattagataatgactggcatagaaatattttattgaccatgatttaatagcttcacaattttcttttcattttaagagcatttacatacttctgagttgtttaatagataaatctcagacaatggcattataacatgatggtgatacaatgataaactcatatattacatctaatggatatcaaagtgatagtttctccaaaaccaacagataagacattttcataagctgaaatcataaaatgcatttacatctgcatatgtatcgtgtacatttataggtgcacatttaactctgcatgaatatttatgtagtcacacatatgaattgggatttattattagtgctcaatatggaattgtaaagtcatggaggcttaaggcagtttcctcaaaacctacttttgcttcattatgacttactggtttaaacttaaccagttgtatattaatagtactgttctgtttgaagcgaggactattcttttcaaagcttattaggactgtatatgaattttggacctatttaagatttgatgaattggattaaagaaataacatctgaaaccttgtaagtttctaatcatgaaggctgctttctgttttatgtgattgaacattttaaaatgtttttgaagaagcatttgcatttgggggcaaatggaagagacgatttcctaatgaaagtcaaaaatgaagaagcaaggtccatgtaatgcatctgagagtgctgtacttttttttttctcaagggatgtagatttaagaggttttcacataatccaagcttgtgaggcatttattcttgcacagattactgttatccattgaactttacagaaataaagtgtgggttattttccctttgaaaaatgtgtgtgaatatgtagctttgatgatgtgagtcataggaggaagtcttaataaccagtggtgtctctgaattgacatgaacaaagtaaaaagtggaagaatttcatcttccattgctgttaaatggatttggaatttgtttaagtcaagtttataagtgtattcaaatctttcctggtctaaccatgtatttgatcaaatccaataatcttgatacatgatatataaagggagaaaggtgtacacacacacacacaaacacacacacagagtaaacaaggcagtgccaacaactaccagaaacccatctgtcacccatgatcctaatataggttatgttatggcctaggcattctatctctcaggatgaataaatctaacaatagatgcaaagttcttatctttttctgtcctggggagatcagagaaggtggggttgggcctaaaggggacattacaatattgtattacaaagctagcagccccagtttttgaacaatgggtgcttcaccttccctctctaccgctgttcctgccccatgacttttgtccatcagagcagaccagaatcacaattcaggtccatcactatcctttccaaatacaattctgtttttaattgactcatttttttctgaacatctaggagcgagttgagtagcaaattatttctgttggcccagttgttttgtttcattgagaagatgagtttagtaaataaaaagttttctggctgggccagttaaagaccagtataacagtatctttaattattttgctattagaataaaacatgtctactccctaaatctaagtatagaaatcattatacatatatcactttatatatatttctctctttctctctttcatgggaaggtcatcataatattattctgtatgaaaatttccagcatgcaagctgatgcctactattgttttcctttccttttaaggtgaaataattgcaaacaacttgaggaaatctctggccaggcgcagtggctcatgactgtaatcccagcactttgggaggctgaggcaggcggatcacttgaacttatgagttctagaccagcctggacaacatagtgaggccccatctctactaaaaatacaaaaattaactgggtgtggtggtacatgcctgtagtcccagctacttgtggggctgaggtgggaggatggcttgaacccaggaggcagaagttgcagtgaaccaagatcatgccactgcattccagcctgggagatagagccagactttgcctcaaaacaaaaaaaagaacagcaacaaaagaaatctctgtacctcctcctatacccataaatcatttcttatattcttatggagatatattttggctctcttttggttttagagagtgctatttcttctgtttttatataatttgaatgatattttttgaatacttcctatggccacacattgtgctagggactggagacaggaagatgaaaagacatggactggcctttaggtagctcacagtctggcaagaaaaaaaaaatcactcaattttctgcttatttatttatatgcataagtgtaatgagaagctaattacacttacttatgtgtaattactaatgtccacagtgtgccaagtgactcagagtgtggggtcagtggggatgccagtggtcagggaaggcttcatagaggaggagtatactgaactttactgaatttttttgagaaaataaggaaataaagatatattagggaaaaaacccttatggtagagagggtgtaggaactccagtcaataatagtttcataattattacatattaaagtgatatttcaggtatcttgggtcaaataaaataactttattatactaaaaatttaaataataatgaaaacttttaacctttttaaaaactttttaaaatgtgactactaggaaatataaagttacatacatgacttgtatcagattgctattgcagaacactagtctagatatatttttaatggaggggacagtgtttaacaaaataattgcttaataaatactttctgaccaattaattgatagtgtctatgttttctataatatttggtacaaatgtttcctctttcttttttttaaaatttaagttctggggtacatgtgcagaatgtgcaggtttgttacataagtatattcgtgtcatggtggtttgctgtacccatcaacctgtcatctaaattaggtatttctcctaatgctatccctcctctgaccccccaaccgcctgacaggacctggtatgtgatattcccccaccctgtgtccatgtgttctcattgttctactcccatttatgagtgagaacatgtggtgtttggttttctgttcttgtgttagtttgctgagaatgatggtttccagctttatccatgtccctgcaaaagacatgaactcatcctttttatggctacatagtattccatggtgtatatgtgccacattttcttaatccagtttatcattgatgggcatttgggttggttccaagtctttgctattgggaatagtgccacattaaacacatgtgtgcatgtgtgtttacagtagaatgatttataatcgtttgggtatatacccagtaatggaattgctgggtcaaatgatatttctggttctagatccttgaggaattgccacactgtcttccacaatggttgaactaatttaccctaccaccaacagggtaaaagcattcctatttctccacatcttttccagcatctgttgtttcctgactttttaatgattgccattctaactagtgtgagatggtatctcattgtggttttgatttgcatttctctaatgaccagtgatgatgagctttttttcatatgtttgttggctgcataaatgtcttcttttgagaagtgtctgttcatatcctttgcccactttttgaaggggttgcttgttttcttgtaaatttgtttaagttctttgtagattctggatattagccctttgttagatgagtagattgcaaaaattttttcccattctgtaggctgcctgttcactctgatgatagtttcttctgctgtgcagaagctctttaattagatctcatttgtcaattttggcttttgttgccattgcttttggtgttttagtcatgaagtctttgcccatgcctatgtcctcaatggtattgcctaggttttcttctagagtttttatggttttaggtcttacatttaagtctttaatccatcttgagttaatttttgtataaggtgtaatgaaggggtccagtttcagttttctgcatatggctagccagttttcccagcaccatttattaaatagggaattctttccccatttcttgtttttgtcacgtttgtcaaagacctgatggtcgtagatgtttggtgttatttctgaggcctctgtactgttccattggtctatatatctgttttagtactagtactatgttgttttggttcctgtatccttgtagtatagtttgaagtcaggcagtgtgatgcctccagctttgttctttttgctttggattgtcttggctatgtgggctcttttttggttccatatgaaattaacagtagttttctccagttccgtgaagaaagtcaatgatagcttaatgggtatagcattgaatctataaattactttgggcagtatggccattttcatgatattgattcttcctatccatgagcatggaatgtctttccatttatttgtgtcctctcttatttccttgagcattggtttttctccttgaagaggtccttcatatcccttgtaagttgtatttctaggtattttattttctttgtagcaattgtgaatgggagttcactcatgatttggctctctgtatgttactggtatataggaatgcttgtgacttttgcacattgattttgtatcctgagactgctgaagctgcttatcagcttaaggagatttcgagctgagacgaaggggttttctaaatatataatcatgtcatctctttctagttatgtatatttaaaataattcagattcaattgatagttattgattgcatgtgttggggaaattactgggctaagaaaagaaataatgttcattatggaaacagaaataaactgatgattgtatggtatcagatatgcaaaaatgaaatagaatatgcaattggaaatgaatagtcacttgaatctggccaaaataaagagaaattgataatatagagagccttatttttgtcattatggtctcacgataaggcaagtaaaatatttttttctaaactagagtctatcctgtcttgaaaaacaaacaaacaaaactcagtgagttatttggtttgcatgcagaatagttgaataaattcattgatgtaaacacaggtaatgtatatgtatatttacaaagttggacagagacatataggaagagaagttagggtcaaagatctctaagttttcattagtggagaggtgactacagaattgaagactttagagaacataaccgtcttgagtactaagcacaaaacttagtttctgcgggtaagtgcacgggaacaatctgacctatagggcaaaccactggccagagcaaatatgtgggttgtggtagtaaaacatttactgcgggcttagctgatcatgttatcatggtgggcaacatttgctctagctgtaggtattcaaagaaaacaatgttaagtgttttgagcaagctcttattgaagaggattggttaaaattggaaattgctaactgagctattaaaaggcacagtatctataaatcaattaaggtgcattatattctactccattgccagtattcatttaaacataaacttctgtgtgttctactcacagtaatacaaatcaaatgtttaagctactttaactaattttatagtgtttgttttttgttgaaatatattgaaataattttctggtaagcttgaagggaaacaaatttgtattcaacaaattcctggtgctataatcttatttttgctttgcttttcacatcttgaccatatgcagcagcatgggggcattgtaaaaagctgggctttggcatttgaacatacctggtctgaatagtgtctctactactgattgtttgactttggccaagtcacttaatctatccaagcctcaatttgcttgaccctaatacctacccttacagggatgttaagggagaaaatataaaatgtattgcttagcacataattgttgttttattttttttacaaggttgaaaagcattctgagcaggacagttagttttgtataatagaaaatgtaattaaaatgaacattgtatatatgaacaatattatttttctggtcccagggtttggaaggaggagagaaagagtgtagggaagaaggttaggagaggggagaagggagcccatggcaacagcaaagaaagctgcttcatttctagttggagccattggagggatcaagtctcctctatgctggatacagagaaatacttagaaccagtacagttgagagaggaggaacagcagtactgggtgattctcctttaactggagaacaggcctcagctttgcctgactatcagatgtccaatcaaaaaatgtgtgaagaaataagcacttctctctctcctcccacgaggcttgtgatgggcacaagtgctttccttcaggctcctgggcctctactcatatgctgccggagagatagtatgaaaacagaacatgtacaaagcatccgttcttgggatctgctgtgtctgagagcacctgctctgtggtgaggcaggagtagagccagcagcaggccacttaagcagagtgtggcacatagtaggatcccatggtgctgacaggactagaatgaacgcacacatcccatagtttacaggccccatgagtatctgtagcataaacaattcaagctttattctagacaaatgagactcttgttatattcacttacacacggtgatggtataagagaagaaaagagaatggaaatcaatgataaattaagcaaagggtattaacttccaaaagacaagccctttaaatgcctctcaaaattctgcatttgcttgttttacaaaaccctttgatcaatgaaatgcagtaggtgaggagtttcacacttagcaattctttctccaaagcctatttaggatgaaccagaaaatctttcacttttttttcccaagcttaacctttttacatagagaaaggatttctgttatcttcatttaaagtaagacttagataactaagatcaattgagttttgagagctatacactttgtcctttagctatgataatatggtcagaactgtctttatgaaaatgaagaaggagaattgtttgatgtatgaatattttcaagagcagaactgactccagttctgggcatcacatttgtttatatgtcagtcatccataatgataaaggagaggtgtctcctgaaggtgggaatgttctttgctgaattttaagtattgctaaaccatttagcaaggggatttgagatcccactcaattcatatagaaagtgggaatagcaagaaaagaacaatattaaatggcactgctttcaaaacaggaatagcctggattttaaaaacttaactgcttcaaaatgacatagtccaataccatttgcatatttgaattcaaatcttttttacatgtatctggggaaatagcatccaaaaatagtttttctgggtctagaacaaagccaaatctaggtattagtctaaggctacaaaattattttcttatgtctgcccaaaataaagatgattgcctctccttctcccctgataggatctcctttgaacatattactttatacaataagttttattcaattctaaaccaacattctaagaatagtatagtctttgggccataatgttagtttattgtttgttcattcttgttgaaacaaaacattgtctaccttttgataatgaaaactatttttctgttttctgcatagtttcaaaacccaagtcatctgaattgtgttttttagagggagtatttttttcccctggattttcgaagaagcctgaataaaacagtattgcattagtaaattggttttcatttgtacagacttatgctaattgtgactttacctgagtctgttttgatgacaaagatgatatatatttgcaggagatttcttttttttccctcaccactagttgccagaatcttgtcagagtagaaaaattggaagattgattagtgtcgttttctttttcattgatttacctgggtttctggctggctgatgaatgtgtagcatcaggtgctatggattatgtgtgtgtgaagaaaaaataaagagctcaataacaaaaataataaattctaccctttctaatgcttacagtttgataggcattgtaataattacttcatacacattatctcttttaatctttgcaacaactggctcttacagatgaggaagctgagtttagagaggataattaatttattcagtgccatgcagctaacaagtgatgaaactggttttgccttaggtttatctgacttcagaacccaggccagatggcttctgatcaaattatgacttaggatcaaattaaattcaagatatctgagcctactgctttactaggaatcatgggggatgcaaagaccacaaggaatttagggtcctttaaaggaaaaaataaatgtgtgcaaataattaagtaataattggtaagcaaatttttgcaggtgagttttagatttttttcccttgaaggtagccctttttgcttgaaatctctgcacctgtcaaccccagaaagtatacattttccttgcaaaagctgagtcccatttccattgttcaagctaaatatgatgaatatataaatttccatgacttctaaaccctgtacagtgttattatctctcaaataagcaatcaaaaatagtctttaaatcatctcctttattcctcaagttcactgctgccaaattttgcttctaaacactcctctatccctctcttctacttctctaatgtggctttagctcggggacttccatgtctggtttggtcaattgtagttttctttctgtagtattgtagcattgggcactactctctgcagactgtccttattgcctcttattattgtggtgtttttctttcaattataggttctaccaagtcagtctttaaaatttttgtggattcacaagaccctgtgtattacagctaatagtcttcactctctgcttcaaagtctttttcccagggttactctgttaaagctcattggcctcatctccttttatcttccagatttctccttccttctacccaggttaaattttttccatgtttctgaagcttgttagagagtcaacaaaatgaaatatgagtttaagtatatcctttgtgatggttacaacccctcacagttttgataacattgggcagctttactgaatgtacttatatatgaaataaactgggtagagtgttgattatttggtatatctgcacatgagattgagagcggggaagaagtagagaaaacccttaatataataatagatttggatcttttccctttagattattctttaagggaatgtcacaggatccttggggtgtcactttgccagccggaagcctcagtggtgggtggtgccttctgcctgagtattacttgctcccacagggcctgttatgcccacttgtcctgataggctgagctcggcccacgctaccagtctggatcccacacctgctaagggcgggccgggcgaggagtggcagggggtgtgtgaacaagcgagcgttggatccagccactgcgcacagccaggcgcgctggctgccgcagtggggcaggcagctccaggcgccagctctgtgcaaggctgcggctggaccagacataccgcaagcggcttctgctgtgggcactggtatttgggcaagtggaacgtggtggcacttgaaagcttggagacactaggaactgcagagcccctggctcagggagcccctaggtctgggctccccgaagggctgcagctcttctcaccgcctgcaatgtggtgagtggggggcgtttttcagccctgtctgtggtacagctctttcagtcccaccattcggtgggtcctgagttcttgtcccacatccaggaagaatgaagtatgtggactactggaggatgagcaaggcagagaggagcttcattgagcaacaaagcagctctcaggagggtagctcctttctgcaggcaggtcacctcaacaagttgaggagacccctgagacccgagacaccaagtaggtggctccttcctgcagttggtaatcccaatgtctgtctaagactggctgagtccaggagtttttatgggcacagaagggaggaagtgtgtgctggttggtccatgggtggccatggatgggcccagaaaaaggacctaagttgtcacttctggctgcggactccacctggaatgggcagccctgcccccgggcttcagggcatccctggcttgtaagtgggcgaggatccacccctttctgctctcagcctgtctgcttcctgcctctgttcgtggtacccaggctattcatgccgaggggtgcctgcaggcccacactgagccaccgccatcccccagcctccctcctatgcttgttggtgcccaaagtccagagggggctgaggcagcaggggcctggcatgtcagtgctgctttcagtgcacgcatacccagctgagttgcaacagtgcctgggctcagctgcaactttactctgcactcgagccggtgctgggagcagagagaggccagggatcaggagcaggcacttctgagcctgcgggggtcgtggggtactcccatgcccctgagagagcagggatgcccagtctggagctgcagctgggtggctgcagctgcgcccagaagcatgggactccaactcggtaggggatggggctcccacctattcctgcggagccttccccactcagctggtgtccctgccacagctgctccagacaggctgctgctgccatcaggaagagacctcatggttatgtaattgttgggggaaagtggaagagacttttatattaaaggtttttgacttttttttcagttaccatgctttagtgcttattaattttttttttaactctgtgattgagatcttccttaccttccaggcacaagctccctctacatcaatgtagtagatacattgcagcatctatgtctgtaccagtgtagtagtctaactttattaggctccagaatcagctgtggaactttaaaaaagtgttcacaccgtggtcctgtccctgggcttctgatttgttacctagagttgaaaaacattcatgtactcattagaaggtctttcattgcgtagattatttttctttttctacatctgtgtttataactaattcatggtaatagtcggctctgtattgagtgaaatgttccattatcagaagaaaagataaattttgtaagttgaaagaataaagtttgcttctcatgtgttctatgctgaattctgacaagattcatgtcttctcatcacaagctattgatctcttcctattttgtgcttattgtttttccctgttcatgttcctgtcaggttaataatgaaagtattagaaaataataaagaagtcaagttgtagcctcttcagttctctcttcattttaagggggagaggggagggatagcattaggagatatatctaatgttaaatgacgagttaatgggtgcagcacaccaacatggcacatgtatatatatgtaacaaacctgcacgttgtgcacatgtaccctaaaacttaaagtataataaaaaaaagggaatgttgaaaaagagcaaattgaaacttagcatttattgaatacctactgtcagacactattcttattcataatgctgtgtgtaatcaaacaaaactggtgagataggcttggttatttgtctttttccaatgaaactgaggctcagagaaataatataatagtaagtgatatagtggatccttgtaattccacaatacatgatctttttttctcatcattgcctctttggacaccttcaaacattaaaggtggtcatatatgcatgtttcttctcctttttcttaaaactgacagtatcccaattttagagtgataaacatagattaaaatattttacatatacatttttgttcccaaagctttaaagtgctgtttatattttaggtagttgataatataccaaaattggtccctctctgttggacacgtcaaattcgtgctttctgttggacacatcacatatacatgtgcaaagggtgccatttaatttactcactcttgaacttgaccatccaagttcttttttaaaaaaacatttaaaatgggaatatcatctctagaaaagaagtcctataatcactaggaaaatcccccatagcaaacatcagtgtgtactcattaagttgacaaagttgtcaggctctcttattaaggaaataaaaaaactcctatcgagatccacatattctttaaacactatacaattaagcagcactgtaatgcagaaaaaaatcattaaaatgttagaatctggagtttatctgattgagtaggggaaaagacccattgggatttgttaacaggaagatagatttgaattgacaggaataattaatctcttgaggccagataaagaaaaggaacccatttgagcctatggaacaccctcaaatacctataaatactagctataaagacaataaatcatttatgttgacccttgctcctgcaaaagagagaatagtttttgcaaactgctggcgtaactggtgacttggagtcccttttatttatttatttatttaacttcctagtcagcagaaagaatgagttgatagcgattcaaacaatttttattgagaacttttctgcagttctagtttttgcatccagccaagaggaaaatgttattttacagcctttgtattggtgttgatgggttcttagctgacttcttgaagaaatgaaggtgggagaggtagataggacacttctaagagaagagcttaaacattggctgttatccaggcatgggtaatcttgcctctagacagaaatattttactagaggtcactgtcattccttttttaaaaaaggctagtaataaatgtgttcttaatttacatatacaccttttcctcatttttgtttgggcttatcttagttgtttcactcttattcttttgccttttattctgaattgaaatgaaaaatgaaatgtgtaaaacactgcaagaaaattctgcaagctctcctcattctgaagcctgacagtaattattatttggggattacaggaaaatcttacagtgtaatttagagattcttaatttattcacagactcttcttctttctctaccttgcttagcaaagatactgtctttccgataaaatctaaactttgtttattaacctgtttcctctttcaacaaatatttttaatgcaaacagtaatactgcagtaattacaataaaagcaagcatgtattgaatacatagtatattccaggtactgtatagattatttgatttactcttcacaaccactctatgagaaagttattgttattattatctcagttgacagatgaggacatgtacagtaaggacattaaattgcttcagtagcacagttagaaagtaatgaatctatataaaagtccaggtctggaaattaaattgtagcattagtcacctatttctcataagggggaagggaaataccaattaaaatacaggttagatttgaatttcagataacaaataatttttagtataagtatgtcccaaatatcgcctgggacatggacaccctatattgctatttgctagacttagcaaccctaggaacacattggattatttgcagagtccattttgagccagaagttatttccagggcatgtagccctactgtcttaggattcaggggaaaggcttaagggtcttcagattttcatgtccccgtgactggcaataaagtgagatttatgaccttgccatgctgcctttttaactcctcagcagtttttcacttgacttccaaggaagtttgcctttgatatttctaagggtgtgtgtctcctacctgttttctgaattgttatctggaaagtacatcttagcaaacagtttaccaataacaacatgaagagaagtagaggcagggaagaagaaagcaacaaggaaaagttcctggctgctctgtgtgccagcgttgtgcaacattctttccatatggcatctcgtttggtagaaacaagaggcatgagtatataatagtgtatattaaatatcttctagtcctagttaggtttctcttagaccttggccagggggttcaatttgaatgactactggtgttgtcagtaaatgaataagtagaaatgcatattataaagtagtcatccatttagcagatagtaaattaaaatgttgtataatccactggagttcaatattgggtcattttcttcaaagaagagagaggtattaattagtttgttgcttggaggcttcattccctttgctgttgtaacaaacggttcctgggcactctcaggccctgactgattaacttgcatagcttccttttgatagctctccttctgacacacatggttaaacaggagagaatgaggtggaggagtagaaaaagaagaagaagaaaaaaaaacttggctcttttcttgataagtgaaagcaaataaatgcaacacatcagcaaacaaaagtgaaatacactgcccaagtcgtccatcttagcaatagagtttctttaagccaaaaatcaaatgtagtggcggtatttcactgttggagttgcaaacaactgagaaatgacaaaagctttttaaggccacggtctttgcaagagggaaagatgtctttctgttgaaactgaaaaattaagatcgattatagctgaggaataaaacctcagtgtgttgaattcaagggacagaattgttgatatagattcttaagtcatcataagtatccaaaagtggaaacttaacaaagtgtggtttccccggtataattttcacatcagtggtttttttctcccccaacctggtctttctcttcaaaggagatttacttttccaaaaagcatttttaattatgttgaagtaaaggcaataccttttcttttaactttaaatttcaaactacttttaaagaaaagttgcaaaaatggaacggagaattttcacatatccctgccctagcctccctcagtattaaaatcttaactggagtgcaattatcagaacccagaaattaacattgatataataccaataattaaacaaaaatcttattcaaattctaccagttttttcatcaatatttcattgttattattctccaggattctgttcaggatcccatgtcacattttgttgttatttctccttagtctcctgaaatctgtaacagtttctcatctttccttaacttttaagaccttatatttttgaagagtatagaatacttattttgccaaattcccctcaatttgggcttgtctggtgttttctcatgcttggtttgaggttatgtgtttttggcaagaattccacagaaatgatgtgttcttctcagcacatcatgtcatgggatttgtgatgccaatattttttattagtggtggtgttgatcatgaccacttgattaaggtggtttctgctgggttctccactttatagttagtatcttttctcctactgttaagaaagatcttgggggacatgctttaagactgtgcaaatcctgtttctctttagactgtgaacaaatgatttcagcatacatccatggattttgattctagttacaattgttattatggtgtttgcttaatggtgattttccacttccttctttctttcaacatgtattaattgggattctacagccatggaagagctgtctttctctcctatttagataatagattatttatatccatgtgtatgaacttatatatatttatttggttttatgggtcatattctaatattattatttaacttgtttaatttgttccagctttggctgttaggagcttattttcatttagtgtttgtgctctcttattaagcccttatttatttttttgaacactttcttacttttttgcttcacactatattctaagcttatttttttcctcctgctctagtcctgaaatcaatcacttgtccaagcttttttctttctttctttctttcttttttttaaatcagagaatggtgtttagaaactgagatcttcatgctagatgtgcttattactactgggatgtcattgctctaagccttctcagcaggcagagccaggaaatatatgcatatgaataacctgcacatatacacacctctatatttctttatctatatgtctatatagatatttaaagccatttgtactatacaatttatactaaatactgtaaactcagggttcacttttagctttttcctgtctttatttgtaatttatttctcaaatagtgagaaatctgcttattttccatgatatgtttacttctttgtttgattctagtgaacacatagttttagaattgctatcctatgcccctgcgagaaacatatttactgactaaattctagcatttatgcatttgtatttgtctttagcttcatggtatccagtcaagatactgttttctgtagttatttaggttagtgttactattccccatcctttcagtgtagttttgtaactcatttgtaacaggcttatttgttatttttgtattgcattttggatcctcatcattgttagttttagttgttgattgcttaggggcatgtgaaaaatatgaatcataactgtggttctaagagccagagctttacaaaatgatgcacccaaggcagtatctgtcactccatcctgtcttgatacacataaccatttccgtcttctttccagctctttgacacctgccctctgtagatagtttctttagtttctggtgagttccttccatattttctttgtacaaatgggcagttatgtatgtgttttcttataatcacttttcttatacaaggagtaacataatatagatactcttttgcacttagctttttttaccttaacagtacatcctggaagttagcctgtaacaattcaaagagatcttcattaatcttttttacagcattattgtactccattttggagatatatgacaatatcttctttatgtaccactttcccttgcagataggtgtgccacgttaacagactaaggaagtttaatattattataaaagaagcaagaataagacagttaaaaaaaaaaaagacttggacaaagctgctacatgtagctgctgcatttaggatcaatccaggtagaacaaaatagaagttaatcagatggtctggaccaccaaaagtttttgacttttacaacttactagtacggtgaatttgggtaagttatttaacatcctcatgcctaagtttctctaatttatacaataggaatgataagaatacctacctcatagggttacagacaagccatgggaaatgcttagcatggggtatggaacatggaagctaaaactggctataatcattattgtgtttccaattgctcttaaatgtactaatttttactctaagctgaagtttttgatgctttggtttatatacacaattgaaaacacttggaattaaaaaaatagctgtctttatttcaaagcgatactgagagagagagagaaatagataaaaataaaatgaaaatgatccccaattttactaaccagagaaagttgctgttaatatactagtaccaattcttccagataattttctatacttatttacaaagtatgtatcttttgacaacagatgtataatttaaacagaatgttatattccacatacctgaatcattcatctcaatttttattgtgaatatttttctgcagtactattcttcttaccagaaagctctatcagatcatttggctatttcaacctaaggtctgattaatcaagtgtgaaacaaaattgaataagcagacaggcaaactaagcagaaatctcagtaaattttaatgtttgaatcacctgggtcctcaaccagctatatattttgtaaatgcagtgttttccaagtacttacctagaaacgatagagttaattcaaggaatcgagccattgcttttcaggccttatttgtgatgttcattttagtggtactgcaaagtgagggaattaacctcaacttcaaacccacgtctttgatctaaaatactcgacagaagcctacaggcttcctctaaggctgcagttttaaaggaggcattttcatcatgactatggtttttagaaattgtaagtttcacagttttgaagaagaattagtcagggaaagtctcccaaagctctcctctgctcccttcctcctccccacccttccttattcctctggctccattatgcaagaagtattgctggtctgttaatattgccaacattctggatggtgctgagacataagaaaatttccagtgatgtaaaagatctagctttattctcatttttaaactcatgtgggcaataaatgagtggataaaatttcagcaaagtttccatctaaagggacattcttaactccaattcttaactcacaaaaccatggagatattcgaggacagagataggcatactgcttttgccatatgaaaaataaacctgtaatatatattttgattctggtactcattgcaccttttaaaagagggtcttcttggaggtagaaggaagaaaatcactttaaaattttttattagctactccaagggtagatctgatattttatttatcttaacctaaatatgcttcataagaatctaagaaatgctgctgtggatcagggaagaggcctttaaatgtaatgttttgtcttcgaggtctctggaggggagagaatgggagtgtgatattgaggagagttcttttaggaccatgtctcaggttccaagcttctctagaaataggcaaggtgcttgactgcatgatgctaaatgttaataattataattatggattactgagtatttgccatgttccaggaatgcacagatgaaatataattaattgcataatttctttcaataaatccaggatacaaggtaggtgttagtgttatctccatttgataggtgaggaccttcagacttggagaagtgaaataaccttgttgaagtcacacagttaccaagttagtaaaccacctgttgaaatttaacctatatctgttagaatatttactaccttagtgtcactcaaccacactcatctgtggttgaatcttactgtgggtctctggggttcccccaagttcatgcttctcttgggttcaggacagcatttacgcactgagccagccatgagtggcagtaggctgtggtccttgggctggcccatctgagaatcccgagtgtctacagcgcttccccaggggatggcgtcattgatgatgaatggcacattgaggctggagtgaaggaaatccaacagagactagaggaaagagcagcaggcacggactagccgcccactgctatccttcctttcctaactgggtcctctcatcttctcttctttagggacatgctgtctgttgaaagcaaggatagccatgcctgctacctgtcttttagtggctccttcatctccctagacaaaagtcaaaactcctttccttggcatcatctgttcttgcctatttcttcctttatgcctcctgacattcccagcctgcatcctagatggaagcatatccagctgcttacagtctcccaaacacatctgtgtgtacatttgtgtgtttaaatgcctttgcatgtcctgtgttctgtgccctttcctcttatgtattgtgtgcctcaaaactccttatttttcaaaatgcagctcaattatatcctcctccatgaaaaattccctgtctcttcatgcagagtaaggtattctttcctctggattctcagagcatcccataaattcctgtctaatcatgtgtgacaagattcaatagtgtttctcttattttttacttccaccgagctgtgagctccatgagggcaacaggtttgtcttggaactgtgcatccctagcgcctagcatagtgtctgtaagtgttcgacaaatcttacatgagtggattaacggatggatctggaatcacaaaccttaaaagtagaacttaccctctttgctaggatgctgtctgacatttggcaaatcacaggacctttcaggaccttagcttcctcacccttgagatgaagatcttgaccatttcctctaacggctcatccttagagcaccattagccagtttaacaatgaggtattaaggagtctccaatggcaactacttttcagcttgcttctggctaaaatcttgatgttagtccaagtttttgaagtgagtgatttcgactgagagaaaggacactgaaatctatggagaccaaaatggaatgaaaaggttgttttatgataggaaggcctcggggcttgtttcactgtcacaggctcttggaatgttcatattgggaggaacctaagaaataagtccaatagcctctttacttcatatatacatatatatgtatatatatacacatacatatatatgtgtgtatgtgtgtgcatatatatacaatatatatacattaagataaacaagttatacttaaaatataaattaagttacttgctcaaaatcccagcactggtctgaagcagaatgcagcctctggagtctccagtttgtacccttctgctgcaccaagcatttgatctctacaactaaaacaatatgttgaataatattgactgataatatatacaaggggcaaagtattaatgttactctccaagcttctgtttcacagttggctcagtacggagaatacttaatgacatattaaacacctttgattactctttatgttcatattggcttggactttcctgccaaatgcagcacaagttaatggacaatttgttgtttgttgtcttttttcctacatcaatttgaatagcatcacaaagggtaaatgaagagtaaatgaagcctcataaagggtacttgacatgacacaccatgctagaagatgtgctaaaataacccacttaagcctcagttagtggggctccagcttcatggaagatgaaggacacatcttccagataagaaactggacagtgtgtgggcaatatagagcaagttctgatgtcaaactctaatgatgacatgaatcataaaggcttggaattgttatatattgtgtctaggtatgaatcagcaggtcaccttttctcaaatggatggacctgttttccactcttaaaaattttacatctgatgaatgtatgaattaactattgaggtataacaaaaccatcccaaaactcaatggcttaacataataagcatttactattgctcatgagtttataggtctgctggatatttctctggtctcagtttgggtctgtagtcactgtgggtcaggtaggcagatctgttgatcatgacttggcactcttgtatctacaggttggtatagaatagctttggctaggataactagcctctcctgaacatggtttatcactatccagctggcaagtcctggtctttctttcctttcttttgactttttctttccttttctgcctcccctccttttctgagttttactctgtcacccaggctgaagtacagtggcacacagctcaggctcattggagcctcaatttattaggcccaagtgatcctctgatctcagtctcccaagtagctccaaccacaggtggcaccacactgggctacatttgtaatattttgtagagatgggggggtctcactatgttgctcaagctggtcttgaactcctggactcaagtgaacctcctgccttggcctcccaatgttctgggattacaggcatgagccactatgcctagccaagtccagactttttctaagagtgtttaagtctaactgcaagagggagatcaaggaaaaccatgacagtctcttgagacctaaccttgtagttggcacatcaacatttcatttgtattctgtaggccaaaccaactcacagggccagccagaatcagaaggaagaatgcaaaattacagggcaaagggtgtggatgtaggaaggacattaattgaggcttcactgcaatcacattgaacacatgaatatgtgttcataaatatgtgaaaaacacagaattaggcagagtaaagggaaaatttcctctttggtcttctactgttctactttcttccctaagttacactattaataattctgtgtattcttccaggcctttatgtgtgcatctctacatagggatggggagatataacttcccttgacaaaatgtatagctctaggtagactttataatatatttttatttaaatgttaattataggttgtatatcccttatctgaaatgcctgggaccagaagtgctttggatttcaatttctttcaaatgttagaatatttgcatatacataatgacatatcttggggatgggacacaagtataaacatgaaattcatttgtttcatgtccaccttatatgtatagactgaaggcagttttatacagtatgttttaacaattttgggcatgaaacaaagtttcgactgtgttttgactgcaacctgtcttatgtcaggtgtggaattttctacttgtgacaccatgatggcaatcaaaaagttttgaattttggagaattttggatttcaaactttcagattagggatgctcaacctgtataaaataatgttttaaaatacagaaaacacaaataaaaacttctatatccatcactctgattaagtaatagaaatatttgtaacatagagattttccttttataaagaaataaaatgctataaattggaatataccaccatgtatttattaattgcttatttattaatatttaggttttgtatttttttgcgattgtgaatatttctgcaggggacattcttgcatggctccctgtgtacctttgtcagggtttccctagagtaaacatctacacatgtaatttatagatctatggcctctgcatcttcacctttactagatattttcattctcttccccaaaagattggtaccaacttcctcacccaccagaaggatataaaagcttccccatatcttaactcacagttgagttattaatacttctcaacctggtggatgtgaaatgacatcacgttgttagtcattttacatttctctgattattattgaagttgagcatcttttaatctacttactagattttagaatcattttgctagtgaagtattaatatatatcctttgttcatttttatatgggattgtttggctttcttttcctgacttttgtaagttctttatgtattttggagactagttatctgtgtcttacctacattcacttattctctttcagtctgtggtttctctttttgcttagtttatgttatcttttgggtattgaggtcataacagaaactttggctaatttgtttttctatattctggaacagttgaaatttaagatggattctggcaaatctcacttctaaacctctttttgactactgtttaacatctttaataatttatatatttacagtagaaactaagctttgcttcagccccctgggctgcgttgggggtttcccaatcctctcctcaaagcctgtgcagccctcatgggtcaagtatctagtttaggttctctgctgggccacagcccaaggccaggactccaggcccagcctctagggcctgtattcttgaaaaatacacctttgggatgtcgcatgcagcccaggtccacctcatattcctgacttttacttctgtatttattcatggcttctgagaacctcctatctttctcttaatttcagatcacattataagatttattttggatatgtttgatcctgttttccattgttggtggtcagaggaatgcccatgtcagcttagtctctcaggttgccaggagctctctggacaggcttaacatctgattttgatgggtactattagtatctcttggctatagtactgatctaaggacctcagctttatttgcttgttaatagatttagcacaagaaggaggtcagcagatctacctggaaagacagaaaaatattaatatacattttcatctcaggcattttatatttaaactttcatcaagcacgtgggtgaaacgagtcctttagaaagaaagaaaaatattaaggctatgccttccttcgacaagtgaaatgctcttttagcaaatatttgacaaatgtctaaatccatatatgaatgtaaatttgtctgtttactctcgattgagctcaaggctgactcacacccatttgcagcacttgttctgtgaacatgaaggactctatagtcctaatttcggctgcctcaccaccttgcacatacacggcgtcaatgagagagagggaagaaatggataaggtttcaccttgaatcaccccaagagctattccttcctgttaaagacaaatggagtctgggccaatgatttaatggatttgatatggagaagatgtcccacaaggccccaagcatataccaacttttgtataaaatgatctgtaagttttgtgccagcctttgatcttacccttaagacaggggtctgagattggaggaccttgacttcctagcctcctattggtgcctaccacacctgtctctttaacatcatctttagctactttgatctgcctgtgcccacaagatcagggctctgccatgtgtcccacagtccctggctgcttgctctgggtagtggagagagaaaaaagggactcagaaacccagggcactggttgggactgaattctggcatcttttgagtgattgtgactggtgtgatctctggattcctgaaaacttggtgactctgaccattagtaatttgtcagtttcttcagatgtttctgaacctccagtttcatggggtccaggattcccttacacctgccgatctgataaaatctagaatcttgcttttcaaagagagagccaaaggcccagcagctttggcatcacttgggagcttattagtcaggtcccacctgagacatattgagtagaatttgtattctaataagatccccaagtgattcatatgtgccgctctacttgactgaatttcaactcagtattgggtatcagtatcaggatccttttgtcaaaacatgaacctctcacaataatggacatatcccccttcacctgcccagtgagagtactctctgtttaatgaccagttctcatgagtctgtgctactggtggaagtgtggctgtcacttgaatgtgttagcaaaggaaagaaaggttagcaccggtgagtctcatcttcactctgcctgtttctgacctggaccacaccctgattcttctgggctgagcaatatttaattatacttctccaatcctagctgcactggggacttggactaggacattcacatactcctcatgctctgcacctccctgctgcatgccgggcgagcagtagcacagaccaaggtatttggcttattgtcatggagcagagcaaacgtccacatccacccatctcaggtctaggaccttggccttgttaacactgacctctaaactgagcttgttactgtgatgttccttgtcaggtaatgagtgcttaagcacccactgcttccaattataatgaattattggcaatatgggctcagccctcaagcaactttcatagtctgaagtgggcaagtgatataaagaagagaggacaaaagacatgcagaatggaaaaaaaataatagcatgtaggcctgccaggtggttatcttggaccacacggcaagtatttcattatcgggcagttttgacacttaaaaaataggtacgttctcaatatagtaacgatggccttccatactatcacttgattattgggagtgtagatgcttggaaatttgcttgctcatgtaatcaaaacatccagaaagtagttttcctgcctgattctttttgaaagtctggagaagtcaccttgccaaattcactacccaattcatgaggttaacaggctttgctaattctctcaagtttttactccaactcaagtgaggaaaatattgcagaaaggtatgccaaagtgcattttaattataaaccaatttttgttgtttaaagaaagagaaagtttctggttatcctatatatttggaagaaaatatttatggcccacctgaggtaagagtggagggacttgccagcagatttttttaaaagaaatgtttctaggtagatgtgatttttgtttataatattgattatttgtaaatctctcagacttttgggtttatagattctgcaaccacggttgcatttgagtattatcttgtttgctatttttctggaagtaaaagttaactatttaaaaaaatgacacgaacttgtctgctaattaaacactttctttctttcttttttttttttttgagacagagtcttgctctgttgcccaggctggagtgcagtggtgcgatctccgctcactgcaggctccgcctcctgggttcacgccattctcctgcctcagcctcccaagtagctgggactacaggtgcccgccaccactcccggctaatattttgtattttttttttttttttttagtagagatggggtttcactgtgttggccagggtggtctcgatctcctgacctcatgatccacccgcttcggcctcccaaagtactgggattacagccgtgagtcaccgcgcaaggcctgaaacactttcaaataagtatattttatttctaggaagggatttaattttcttgctttgattatggcaagattttatttcaggaagtgcagaattagaattgtttctgctgagattgaaaacgtccactggatagatgtcctttggcccagtgtttcctaagcacatggccaaagcagtgcagggcactgggaagtccccatgtatgatgacaaatgctcatgactaatgagtcagtgtgggcagataggtagaatttcaacattgatcaccatcctgtataaaaacctgctgcggagatgattaactaaaatgtataaaactctgtccctcattatcagcacctttttatcaaggtagttgcaaacagatagctagaaaggggccaactaagcaaacaatgctctacagagtccctttttcgacaatgtcatctgcattgcttacacagtgggcactggctccaggctgggctcttagccgggacaaccagccaaggaccaaacaatccagctggacaaatccaaaagcatcctcaaaggaagagaaggaacaacaacaacaacaaattgaccccaaatgacaatcatagaagacagcaagggatattatagcataaccaggagttctggaataagtctgtgcctatatgaggttaccagtagaacacttcaattgggagctcatctttaattttgttttgagtgatggaggatcaagggctcttgtctacatggtgacaacaaagttgatggattctggtcttagctctgacactgctgagcagtgtgagttggacctacatactcctctgaggcctcagtgaagagggtagcaattttaaccattccagtgagtgcccaccatatgcggccaagatggtctcagggaccatggcattagggaatggaagcagatgaactgtgaagccactcagcaagaggctccatggctgagaaaaatcagcttagaaaactaggtcagacctgggtggtgactatatcagaaacctgcaagaggaaacactgtaaatgcattagccagggcaaaattgattatttaaaaaataaagataaaacaatggattaaataagccatgctaaatagcttctgccctgatagaaatgggataaataattggaattgcaggtgggggttagtgggaaggttctattttaatccggaaaagaaaaagactcattttcccttcagtttcaagcatgtgctttagtttcagattcatcttcatgttacaggtgaaagataaaggcccctggtccaccctggatgtttggtaaaatgattacactgattgtcccaatcagctccctgaaggttaagataacattttctttgcagatatacttttagtttgtaaaatcattaagttttggaggatactggatgacacacattgctgtaattatcacttagcctgcagtggtcaacttagttgaacagaatgtgacactaataagaaacaatgttgtggatgcaatctcatgcaagctatttgacttcacagagtggaggaagtctgtgtttcatgaatacatcccatctctggacaacaggcttgcaaaaatagcattttggtatctactgagattgggagagaatgaatatgtgtggtcagtatgggccatcagtatgatgagacagatagcacaaagcatttaccctacaaccagtgggtctcaaatacatgcaggcacaattttcttatgatgaggtatttaactattttatgtagccataactatagcagtaataaagtttccgtcatccattatctgaatgcttactctttctaggcatagtagtaaccaggtgcttgaattttctcatttaatacccatagcaacccatgagggagatattgtttttccatgttatagatgaggaaacctagtctcaaagatatgtggagacttgtccaatatcagtcaattagggagtgataattcaaagactgggtgttcttatttaggtggactcagctaaataagggtgacatgggaattggcttctcaaacctagaagtatatttttattttatcacattgatcatgcttttcatgctaaggtatcaatacacatggtaaatgagtgaatgccctgattgaattggtgtctttcattaaaactcaaggcactgggcattttatggcttgccaacctgagaaagaggtcagtctcatagaacaatgatggttaagatgcccatcttctgattgatagagatatttttacaatcaggtggcaatgattttagacaaaattaattgaaatcatactatgaactgggcattgccccaagtgctttgtacattatctcatttgatccacaggaaactgaagcacagacagctgaggcttagagagtctaggtaagtagctgaaggtcaggttgcctgtaattgggagaactaggatgtataaacgatccatctgttttcagaatcagagcacttaactgcctgtatactatgtgattttattttctgatatttgttactaaatatttgcacatgtaaccatttatcaattcagataactttatgggattccttcttgagttgatcaagtgatattttactattagctttaaactattgaaaaagaagaaaattgtcttaattttacaattctttttttaagataaagtgttttcaagttgaatatagttttacttattcaaatggattttcttagctatgctttggtgaggaatgctggattttaatgcacttactactttatcttataaccacctcttctttctaaagtgacagtttctaggtcctcacctttagctcatgcatatgtatacacaatatatagactttgcactcaaaccactttgctttccaattttctcctatattaattagggtacaggtttggcagctgtaaaaattagatgtcaaaatgtaatacttcaaacaacatagatgttgtttaggaaggcatttcagggagggtaggcagcttggctccatgaagtcaccagaaactcaggttctgtctcattgctctgcatccccaggcaactgtccccatccatgtgctcagtggtggcaccctccttcacatctgcattctggcccatgggaagggggaagggacagagaaggggaagggacagagaaagttaaggacaaaaaatttcctttataaacatgtataccattggctaaaattcatattttattggccaaaatgtagttatatgaccatgtctagttagctacaagagggggttatgaaatgtaggctcttactgagccacctttctggtagttccttatctaaaaggacaagagaagaatggacatgggagataatgaatagtctctgttcacagcttgtctccctagcatctaagtatcccttcctacccttcatcccacgtagaggatatgcccaccttcttcccaaagaggcaaaccaaagcccatttatttactgcacccagctgagagtccaggtctctgggatatgtctaggcctctctatcagggtggatgtgcctccagtgaccccggcactaaaggacaagttatctgccatgaaatccctacttggaaagggaaaagaggaggaggcaaacagcataatctagtcagtaggagttagcgctttgttgttgttgttattacatttctctgggcaagaactacttggcagtctttattaggtcatcttggccaatccaaactcactctctgggtataactccctgtccattgtccttgatggcctctgtcttttgtggccacatctgtggtgggtgttagataatatgccctcattggtagcttccctccttgtacagcttgctttctactggtgcaggtttgggaacctgagatttggtttagtgattcaacagtcactagctctgtcagccaggtttttgttttctttggcaatgtaatacccgcaaaaattccagtctgtctgcttccagttccacattaaagtagcctttggctgtagtttttaactaccttttgatttattggctttgtagcttatttattggtttggtagcccactcctaactccctcagtttaagggcttcttccttgaggtcatctgaagcaataggctcgaatgggaaatccaggcctgccctacctgaatgtttgaactggctgccattgtgtggcctaggagaatataggagattcttgaaggatgctctgagcaacagtcttaccttgtactgcttggggaacagaaaaagttggcttttctagcaggagtcctcagctttccagctgtcaatatctgtatctctgtccttacagcctgtgaccctggtctcagatattgttatggcaatacccacttctaggtagaaactgtatattagaatacaggctaaactgctgtaacagagatttgtgaaagtagcttaaacaagctagaaatttctttcttttttacccaatggtctcaatcaaggtgggtaggtggcccaggatgggtgggtacttcttctctgcaacattgattagagaaagccccgattccttctgtttgttactctgctgagtccccgggggttgctctcagctgcagcactgaaactggctcccacaatcctgctcacattccagtctgcaggaaggggcaagtgggagagaaagtggagggtgaacattgtccttaggaaacatgagctgaaaggtatacacatccttcctagttataccttattggccaagacttagtcctttaaccactccgaggtgcaaagaaggctgttggaagtagggaggtgtagtctccagtgggatagccatttgcctaaataaaattcagggaattctataactaaaagggagagtgaacagcggatagtggggggagtcagatagtctgtaacacaatcctattgacgggttataaaatgaggttaaaacatgactggagtcgtggcaagcccttaaatactttctctttcctaaggagcctatccatcatgaaaagtgataggaaagaaaaatctcctctaggtcctgttactcagctctttccctgtgttcttacaaatacaatgtgagttgagttttaagaaaaaaaatcacaggacaagtgatcaaacgttttaagttcaaatatcgatcattttctgagttcctttcagccaaccacattatactttaatcatggaaacgtatctgtgtgtctggaaaggtggttataactagttccaagcagcatgatttagatggtttttatcttttcttaatactgccattgttgccagcccagatagagtaattcaggcttggtagtggtaatgtttgtctgagagcaagcacacttacgctggtgaatgaagaggtaaaaatgatgagcttaccctgtctgaatctctgctgcccctgaaaacactgaacctatagacgaaactgctttctgagtttatattgaggaacaaggtttatttaggatgagaggaggaggaaaacacagaggtggcatcaagcctgggaaagtgagtagggttggaaaatgtggtttcaaaggtatacatatgtattgttttctgatgtggtaagttcatgtggacatctataagcaatttccttgtcatctcagttgaactgttatcatctctaacacacaattgtcaaaattcacttctgaaccttgctagtgtgcacacctgtgcctttgcatccctcaccattcagtgagttgacaagtaactgcagatctgatgctctggcctttgtctcattcagaccttgaaattgttcttctcctcccccatgtccacatagcatctcctcaactctgataacatacttttctagtgttttgtgagctttagttgctgccatcctgcctaggtgttgaagattgccagttctagtaagtttgcattttgcagactctaccatggtatctctgccacctttgctgttagtagttctgagctaaggagttctgggtctcagccaaaacagtgaactgtgtctttgtgtccttcatttcctttccctcttgtttttgcgtctttgccatggaagtttccctcttcaacctaaagccctaggtaccctaaagtgatctacacaaacatgatgcctctctgtagtttcatgctttgtttttaaaaatgtagaatgcaagatttgcattctactgagatttcccaaacattgtgctagtcccagagaggtgacagagaatgaaacagacatggttcctgctctcatgggtccatagatgatgttaccctatatttattgagcacatattacatgacagacatttttctgcattctttacatgtacaagatttgcattctacagcataatttattcatttgttaaataaacgaatgatctaaattactaccagttaaaacgttcatctccctatgcttccaatatttaagaaaaacataatttgcaggaaaataagctatgtttatcctgtggctttgcacaatcttttgacacatggctccaaacctccaaggagtcaaagtattcctctttgagaaacatacactatcttagtcaaagaaattaagctctaactgtgagatttatgctaagtaatattgcttatgaaggcaaagactctctcagaaagctagaaattatatcacagaaaagactacctcctttagatccagtcctaccaaccagccattctagtttctgcccatgtctcatttgacccatgtaagtgtttactgtctctcttttgaccctaactacaggtacaaagaatctgagatttctgtctctgacccttaagtgtaatctcatactatttaatgttttttgactttaatattgccagtcatttgaagatatattttattcatttgcctttcaatttttttgtattgctatttctctggcttagatattgccagtatgttcatttttaactctgtggtttaacctccatgtacaccattattaaaatcaattttaaaaagtcataagcatgctgtggagacccatcactgaacatttttatgaatgatttagagtggggctaaataattacattttgtggctgaaagactctcagttgataagttagaggaataaaccatttttttgccttcttaaatatatactagagctatgtatttttatatccattttataatgtagaagcatcttgatagcacagttgagaactccaggggattttgcctccatccacatttctctaaatctgactccttaagtatttgggaaagaacttggttaagtttaagtatcaacatcatgaagagttgtgtggggcatacaaaaggaacaatgtcttacccctagcaactggggaataaggagacacagtaaacatgtatcaacaaatatatcaagggcttaatgggtagcaaagaatgaagtgattaagtattcatgccctccacatgtattcactaagctctgctacttcccaaacattgtgctagtcccagagaggtgatagagaatgaaacagacatggttcctgctctcatgggtccatggatgatgttaccccatatttattgagcacatattacatgacagacatttttctgcatcctttacatgtactggttgttaatctttacaataacattatgaggtatgaaatacatttatttacaactaggaattgttggaaccaagatttgaaccctagcatttctctccacagcacagagcccttgacttccccactgtcctcctacattatcagccggtatgtccagagttattgacctataagctgtgattagtgctaagaacaccaggtgctgtgagaatttaattgggattggtaaatgtgggttcagagaaggctacatagagaatagttaaaagtagccagtgaagtgtgaacggaacagagactggaccaagtcatagagcttggtgtgttcagcttttacctgactagaggaaatttccagataacattcatccaatccttaatctatgttcttaactctttccaggatgtactatttgcctgcattgctcttcgcacctgactgtacaacctaaaggagccctccccttgcttttctgtagctttgaatccagtccctttaaaaatattttctggaggagaggaagataaatgtgtttctgtcaattgcattctgctgggggctaagccacattgcagctgtgtttgtgatgctgaaggcgtcattcttgtaactgtgagaggatgggtctttctaggagtcagcacacataattccttagagaaagaatcttgggcttttcactatcagagtcatcctcattctggttttagcctttcctggatagggataggtttcagccactagaactctgacagctctcttaacttactgcttcttgatatgatataactccacaacctgagatctctacttcatttcatagccaatcttgtcttaatcggacatttgagggaatccatctatctctctctttcttgcctccacaatctgaatcacacaaattcatttctgagagttcttttgaatttttcttctttatgtgacctataatattcacccctgcctggctataagggactattattcttttttcacatatcctaatttgtaagacctgaacctctccaagaaagtggagagaagaaagtgcttaactcatttcattaaacttaatttgtagtctctaggcatatttgtatattatttacctgctaccctttgaatgcaataatatgccttaatatgtatgtctattttctctagcaagatagtgtactctttaaggtgagcaccatgcttttataaaataatttttctcagaatcctgtgtgttgatcaaccatggatacacaggaacgtgtcttaaataactaatactgtggtaattctttattcagttgtctgtgattttttttgtgtagtgccaaccttgaatttagtttgtcagctaaaaatacatcctttattttatattaactaatgataaacaatttaatcattgattgacctttcttaacttccttacttttggcattgaggagtattagcctttacacactttggtttccactgccctttaaataaatgtccgaatgccacaattaacttaatagattctaaagaaagactcatagcaaaggcaaactaaacaaagtagtcaacctaccaaccaacataaaacagtcttgagaatagaaaaaatcatttatggccatcttttagagatgctagtgagattcctgcactggtaaggttgacccaagattacccttaagtttctttctaagatgctattttaaaatttacaggataaattaaagaagaagattaaaaggaatgttaattagcatagtaagtagaaaaatgagggctttggaatttgttgtgagaagggcaatagttattttgagttagatgctaagtgctgtgtgatgctctcaaagcaaccatgataaattattaagtatttgtaatttattatacacatcagaaaatatattgcaatgtgagctgatgtcactcaatagcactggctgaggcatttgtctagaatgttgtgtgagattgaggaagcagtggactcattagtaactcacattgttgcaggagactgtgtttttcttcctatgaagttttttttacaacttcaaactagaaaatgaagaattataaagacatatttacattgttcagttgtcttggtgagacttctgccctctgaaattattgagataatactagtattttccaaaacatgaatttgacttctatttgaagtaatgttttctaaattctttattaatattttgggtttttgactttttagttatctgtgaatgatatgaaatgctattaatctattgtttgttaacctagttacaagctacatgtcctattatgctcagtgcaattttataaagaataatttatactaaacatgcaaaagcatgcctcaggtaaggattaatgcataagcccctagagattaccatttttcacagaatctttgcaacctgagtattttcatgtactgattcaaagcacatcattgaatttgtatttggaagagaataaaatatattcttgcattttatttcttagcaattgtaggagctcttgtcatatgctgtggtttgttagctctggcacaccttgaaaatctttatttcccattactcctgaaaattattttaaaaatcatcctctattttaactaacgcatttttcccttggatattctaaattttacctccattccaatgcattcagtatcatctctgctcacagacaaattgtttcactgcccttgagaggatttcctgaaaacttcaaaagtatctctccatctgcaccaagcagtgagcctgctggagagaggtggaagcagaagtgagggggtatgtgagtgccagatggatggggacagaggaggcttggaaaagcagacaaagagagagttcaggaacaggccagggcatagcaaagagcaaggattatgaatacaaaatacacctcagttgcaaggtgaaaagtagcggtctccaagaattctgactatgaatatcacttataatactcggctcacatgaaaacatttaataattgataggaattatcagctcataatcttaactatgttttgtaacccattagaagttagaaggaaaagtggccatgaaaactaaataggataacaattaggctgataggatgatggaattggattatcagaggaaatgaaaacttggttgaagacccatcattattatttgtttaatattgtgctttcccttgtctagaaccttgtctgagacctcatctgacattcctgaggcaaaaacatatcacagtcagaaggaggactcggcaagaccagagcagtgtgtcctcccaaaagaggttttcctcttctgtaggactgccgatcccttggttaatttctaaccaacactgagcaatttattttgtatgccagccactgttctagctgttttgcatgtgctagctcatatagctcatgtcagctcttatgaggtcagtactactactattgccattaaaataaggagaaaacaggcacagagaagttaagtagcttcagtaagatcacacagccaggaaataggaactgggttttgagcacaggcagtctggctgagagtcttcattcttaatcactgttgtctccttcctatctaatatagctcagtaagggctttgctccatgagaatcacattctaattggtgaagacacagggctatgattcctttcttatggcctctgttgatggagactccacattcatctttagcttctatattcttattaattcaatgaaatacatgaaagtatagtataaattgcaaagaccaatacaaatattatttaattatctcccaaacaggggaatttgtcccttaggtcctccttaagtttaagtttctttatattttaaatcttgtatgagtacagaattctgctctgtactcattctgtatgagtacagaattcttctctgtactcattctgtatgagtacagaattcaaaaaggatagacactagcctcatgtggctgtttaaatttaaatttaaggctggaaatggtggctcatgcctgtaatcccagcactttgggaggctgaggggggtggatcacctgagggcaggagtttgagaccagcctggccaacatggtgaaaccccgtctctactaaaaatataaaaattagccaggcatagtggcctgtgcctgcagtcccagctatgcaggaggctgaggcaggagaatcgcttgaccccgggaggtggaggttgcagtgagccggggtcgcgccactgcactgcagcctgggtgacagagcaagactccatctcaaaaaaatacaataaaataaaaaataaaaataaatttaaaactcagttttttagtcactctagctgcatttcatatgctcaattgtcctatgacgctagtggctgctgtcttcaacagcacagctatagaatgtggtcgtcatagcagaaagttccactggctagcactagacagattacaaaaggcagtatttcctttcaaatggggcaacataataattaaatcacattggcattggactatcttatttttaagcttttttatgcttatagaattaatatgatataatgtctcttccccttggtcttcttgcttacttattaattcctttaagcaaatttcctttttcttgttcctttcgttttcctccttttttctacttcaattcctccttccatactgagtatgtgtgaaagcagctgccagagcccattaaatgcatcaacacctttgcctgtggacagtctgcttccagccttgcttcctcagacaaccttttctgacctgcaagaggattctctgatacagccagattggacctgaggttctgcatcacccttgaatacgtatttttttttccctaaaagtgttcacactttctttttaaaatagttttgtagttcctcctattattataagggtagacgtcatatttaatgtacatgtcaaagatggtatccatattatatttagtaagtcacacaagatgaactattttatgtatcttttaggccagcaaatgctttaacagtgccttgcacttttttttttttttttttgaggcagggtctaactgtgttgtccatgctggagtacactggcatgaccttggctcactgcagcctccacctcctgggctcaagtgatcctcccacgtcagccccccaagtgtctggtactacaggtgcaaaccaccatacccggttaatttttgtgttttttgtagagatggggtttcatcacgttgcccaggctggtcttgaacccctgagctaaagccatccacccatcttggcctcccaaaatgctaggattacaggtgtgagttaccatgcctgggcaccttgcacattattagtttatactttaagttcaggcacatgtgcaggatgtgcaggtttgttacataggtatacatgtgccatggtggtttgctgcacacattaatctgtcatctacattaggtatttctcctaatgctatccctccccttgccccccaccccccaccccccaacatgctgcagtgtgtgatgttctcctccctgtgtccatgtgttcttattgttcaactcccacttatgagtgagaacatgcagtgtttggttttctgtccttgtgttagtttgctgagaatgatgatttccagcgtcatccatgtccctgcaaaggacatgaactcatccgttttttaaggctgcataatattccatgacgtatatgtgccacattttcttaatccagtctatcattgatggacatttgggttggtttcacatctttgctaatgtgaacagtgccacaataaacatacatgtacatgtgtctttatagtagaatgatttataatcctttgggtgtatacccagtaatgggattgctgggtcaaatggtatttctagttctagatccttgaggaattgccacaccgacttccacaatgtttgaactagtttacagtcccaccaacagtgtaaaagtgttcctatttctccacatcctctccagcatctgttgtttcttgactttttaatgatcagcattctaactggcatgagatggtatctcattgtggttttgatttgcatttctctaatgaccattgatgatgagctttttttcatatgcttgttggctgcataaatgtcttcttttgagaagtgtctgttcatacccttctcccactttttgatggggttgtttttttcttttaaatttgtttaacagaccatttgtccagtcacaagtagcagaaacttaaaagagccctttgatttttaaagtcacaataaacaggctgggcatggtggctcacacctataatcccaccacttttggaggctgaatagggaggattactttaagccaggagttcaaaaccaacctagtcgacatagtgagaccttgtctctaaagaaaaaaaaaacatactaccaagtgtgatggcatatggctgtagtcctagctacttgggaagctgatgtggtaagatcagttgagcccaggagtttgagattacagtgagctgtgaaagcaccactgcgttctagcctgggtgatggagtgagaccttgcttctaaaaatttttgtttttaaatataataaaaataaaaaatgagatggactgtttgataaggtactaccactggaagacgttgaacagagactggagcattcatttatttattggttaatccaacaaacatgtatttaccactactaagggttcacactctgcaagacactgaagatacagagttaaaagtacatttctaaccttaaagaaccaataggctggttgggaaaatgtggaactagacaaacacagtgcaatggaataaatgctccaattagaggtttataatctgtttgaatgaggttatgaatgtccaaccaatgctgggaagacaagaagttgggaaggtctcctggaggagtggacccttgaaaggcatcttgcaggacatgtccagatgaaggtttgtaagagcatgaaattagttggtggcagatggttgtggagttactgatgtgagataagactgaagtctgagctaaattatgaagagccttgtgtgctatgccgtgaagttcagattttgtcctggaagaaaataacatgctattgaagtatttaaacagagaagtagcgttcaccatcagattgaaattttagaccacatacagtatgtcaactattgaactggaggcagaaatactggcaaagaggttattatagtaacccaggtgagaggtaaggagggcttgaactaaggccatggcagtgaggagaaagataatgatggctggagtagacttgagagggatttggggtttgaaacagtaggacttagtgactcattgaatgagggcaattaagcacagtgaggggtgtaagataattatcaggtctccatcaaagatattgctgcaaaaatttctctatgggtaaaagactaggttaaataatatctatagtcttttacatttctatgagctataatttaaaattttattaactttcagaactcctgatagcttacactaataatcttaaaatataatacgggtaacatttaacacttacatagtatgatgggatatcattttccatatattacattaggagaacgttaaccatacagtattcaatattggcaagtctgctatataatcatatatttctaataaaagtataaattggtataaatcttttggaaaacaatttggcactatgtaccaaaagctataaatacattcaacctgccatgaatttatatcaaggatacagaaaacagaatataagaagaaagctatatcagggaaatatgtattgcagtgatatttagaactgtgaaatattggtcatgacctaaatgtccaagaagaaggagaagagtaagtaaaattggttacatcaattctgtgggatattaggtagctaagaaaatgattcctatgaggactatacaaggaatgactgtgtgccaagacttaaaccacatcttaggttcaaaatcaaatgttctttctgttgcttctcttgtgatagcatgataatgctcagtgggaaaccaaacacaaaaagtacatgcacattaataatttatggatttttgtggataaagactgaaagaaataataatttttaatgctgggatgataggaatatggacaatattttttttagaaatttttctttatgtctttgtactattactccacaatgatgttttaacaattaaaaaagtaaaaaataccaaatcagttttattttggtttcagaattgtattgtttagatcttcagctttcccacagattgcttgttattatccttcccaatttagaagagttagatatttaataatagaacacatgtgcagcaattctagtactgcattctgctttctaaaaattcattcagcacaaatttcacagaagcccacctacacttttgagctatttaatttttcacagttttatgcccatgttgtgctgtggcacccatgcaaaaataacttgaatgctaactattctgcagaaaaatagaagaaatccttgtgatagctctgaaaatgatgaatcaagtgctattttggggagtttttcatgcttaataataacaaatggaaaacatgaagaaaaagttcctgttttgaggtcttgctctcttctgtcacattctacctgaagttattaaccaccatcttccttccctccatttctatatcttttctttctctgtgtgtgtgtctcttctttgcctgtttttctcctggtctcacataaattgtggtcttgcctgctgagtttccaggacgttcactggggacttgttttcctggagtattgtgaagcagcatttatctgcctatggatttggttcttataagggccagtgacctctttctccttcgttttcctcattcaacttcttatatacattataagctcagagaggctcctaagttcattaaattcttttgcatgatgctgtgtacaattagagccagataagaacctgattcttactgacgtcatcagcttctaagattagtgtctttttctataaagagagagagaatcagaaggaagggaggaaagaaggaaggagggaaaaaggaaggaaagaaaaggaggaaggaaagaaagaaaagcaaaaaggcaggcaataccacccatgtgaggattgtggatatgagttggtagagggtgagaaaaacctgttactagaagacaatgtgccaacctgatgttgcacgagttactgtatctgggacatccatgagatccagagggattatgcagtctaatccctgttgtagaatgacataatgcaggaaaataacttaacatcttttgagttacatgattgttcccaagtttatgcccaagtgatgtttgaaatccgtgagatttaaaatgaatatttattatttggtattaaaatgaaggaatgccctatgaatccaataccttttatttctttcatcacttgcatcccaaattatctgtcagttgggatacagtccccttgccaggcatgggcctcagtgtgagaccattccccctattgctgatgtttgattctcctttctcttgtgtaaatgacgaggagcaaggagtctcttcattcagcaaggagtctagatgtaggtggcccatttgctgttggaaaagaaaccactcagatcctttctggagaactgtgaggtaattaattccagagcctcagtgtctaccatacattaaaaaatacatgtagatgtatttgaatcacagattaatggaatctgtgatttatttctcaaatagaactcatcaagtttcaatctgaatgggttagttcagactttgccaagaagctttctcaaacctcttctcttcctaaaagcactcatgccagagtttcaagctctatctggaggggttggaagacagccactgatatatttcatactctactctcttttcttatgaaacactactgaacacctaccaaagttataaactcgcatacttcatagctaggacactaaactctgccaaggtacatgactgcaaatacctacctctgggttctcacgtgtttccctgttctctgaagccattttgtccactgaatttcattttcttgtggcccttgaagtgcttaaaaaggattagttgggtaataattatgtctgtatgtgagaggactcttattttctttattatagcaacaaagataatattatattgcaaacaatatccagataaagtgtcagtagtggttttggttaaatgataggtcttatttgttattaaaaccaattactgatatatctgaaaagaacctttgacatttgggtatcagaccaattagggacagattagtaggttagtgttgacttacatgaaaagcagatgctttaaacccaggcaacatggattttcatgtggttcttattattttagtcaatgcaggttgttttctggattttgttcctaaaaatattaaacaagcacctattatgccaccaaaacaaacaaacaaataagcaatcagcataagataatacagtcacaggcataaaggtggagaaatgttttaaagagaaacctggttacagaagatgcttccctaacatacaggactaaaattatcttgctatctttaaactcttttttcctctgtattagtttgttcttgcattggtataaagaaatacctgagactgggtaatttataaagacaagaggtttaattggctcatgattctgcaggctgaacaggaagcatagtggcatctgcttctggggaggcctcagggagcttttactcatggtagaaggcaaagtgggaacaggtgtcttacatggcaggagcaggaccaagggagggagggggaggtgctacatacttttaaacaaccagatcttgtgagaactcactgtacagtagcaagggtggatgttgctaaaccattcatgagaactctgcccacatgatccaatcacctcccaccaggccccacctccagcattggggattacatttcaatatgagatttgggtgaggacacatccaaaccatatcatccccacttccacttaatgaccttaaaaatcagggccccaaacatgtattttacccaagcgatattgtatatagtgctactggacttcacagaaacccactgccctccccgtgcttttgaatcttgatccccaagaacaattatttccaacccctttagctctttttctggtatttgtctccatttttcacaaaacattttcatgttgctatttcttgattttttttttagctttcattttgattgtctactacggaagacgatgacttaactccccacagtacacacattgcacatggatgtgcgtatgaacacacatacacttcctttcctccaatctttccagtaggattgtatcataattctgatttaattagtattcagtgcttgtattatcatgattctgcatttgatgttgcagttaatctagtgtactaaaataccatttctattcttaaacattttgtttttcctgaaattaatcatttcttgctttgtcatatgcttagatttctatataacttatcaattcatcctcaaactttgacagaactgtacatatcctttcagtatatccaaacacctcaaacagcccatccattcagtttcttttcttcttggagattcttctggaggcttcctttccctgctctaatctgggtgggatgatctttggacctttgatggctgttaactctgcttctcttcatcatcactttgagaaatcccctttccttctcctgtggtgaattccctgctacttggattctgggtcttgttcattcttgtttcctttcttggtttggaaagcttcattccatccctgagaagcttcctaaaaaaaggtatgcatggaaggtaaatgatttttttgagttttcttcatattttaaatagactttattctacctacacacttgatatatagttaacttgctttcttttcatttcaaataaaactcattttttcttataattttgaaggcattgctccattttcttctgacttcacattattgctgtgaaaatcctgaaaccattctgagccttaatccttctctgtaattggtttttactcacgagtgttttaaaattttgtgttaatattccttcatataggttttcttccttccccttcctttcttttctttttgctggtattttataactattttcaatccaaaagttcttattcttcagttctgagaaatattcttaaatttttctttggtaatggcctctattttctcttttggggatttcaaaattggaaagttaagcctcttgaatgaattctccaattttatggtcattttcatttgttttgctttctgaaatgttttctctacttgctcttataccttatctattgagatatttctatcatctcctttttaatttctaggagcttcttcttgccctctgaatgtttctattcttttagcctcctattcttgttgcatggacacacttcttgtctctgaggatattaataatcttgaagttatctatgtatgtcttatttcttgtcctctaagtttacctcttctgtttgctttggttcctgactttcacggtaaaggctcctctcaaatgtctgctgtgatattaagagtgaggtgctgacatggtgtttgtgagccttggaggtgaggacaaattcattggccagtgggctttactttagctcgagcaggtggaattggtcatttagttgggaaacatccatgtaagtatcagtatgtcattacccttggaccagattctccagagaagactcttccaattttctgtatggggtttagtgggggcaggggtgggtggggggagataagttaggctactgcagtctggatgctaaacagggagaggggaccagggactatccattcagcatgcagacttttattctatagaaactcactatgtcttcagctgtgtttgatgtccctgagttcatcctctatagaaaatgactctctgatcttctgtgcagagggactggagttgagggaagggactttagagattttcaaccaactccattttcaaccccaccttctggagcctctggtacctccactccagggccttcatcatgttaagtagaacaccagctttgtttctgttggcctcatccccagccccactccttgtgggctctcactgagctttttctattctggtaagtcaattgcaacttggtaatcatctgcttttcagctttcaaaacattggtgacatttctctcctcttttcccctctttttttttatagtagacaacttagttgggtatttggaggaattagagtgttttagctcaggttgctaaatcaaaataccataaactgagtagcttaaacaagagacatttatttatcacagttctggaggctggaaagtctgagattaggatgttagcctggttgggtttttcatgagggctgtcttcctggcttgcagacaatggccttctcactgtgttctcacacggtgaatggagacagagagagacagagagagatcagtctgatctttcctcttctattaaggacactaatcccatgtgggagtcttactctcatgacttcatctaaacctcattacctcctaaaggtaatactatcacatcagaggggcagggcttcaacatgtggattttaagagtacacagacattcagtttataacatggaggtaaatgaatgtgttctattttccatgctcagcaagaggccaggccatgcaacagtcctttttttgctgctgctattagtgagtctcagagtaacaggatggaagtaattgaaagggtgttgtatcaggtggctcatctccattttcaggtttttaaaatgggaaagacagagtaagacaagggaaagggaagggagagaaagggaaagttgagcaggatcaagaaataggagagagaaatggacgaggagaggaaaagcgaggctattattgaatagtaaaatggaagccattgttgtcttcatcttcagcccatccccaacactcctttcattttttttttttgaactgacaagagaactataatgcttcaatgaactggtcatcagatccctagcacctgaccaaggctccaatactctaacaaaaaatcagtttttaagatccccagtcattctttgacttgtgaagtcaggatttataattttgaattggaaaagttttctgatgtaccctctagttcatctcctgtaggcttttcaaaaagcaatttattgtatttaacatgatgttctattcccgtattagaacttacataattcacagtactcatgggaggcagctatgtggtatattcatagaaacacaaaatgttgaaattcaaaggcatcttgacatcatcctgtcaagcacccttctttttacaaatgaaggaactgatagccacaaatgttacacatcttgcccagggtcatgcagagggaacatgggtgtgctccactgcagggatgagaagaggatagcatgccatgagtgaacttgaacgagtgcttctgttactctgtttatattccaggatctttttttttttaaacaagctaagctgcttttcacttgtagatatttacatgttatatatggttaagctataacgcatttgcaaggagaatgagttttatctagaagtcactgcatgaatggaaattgtggaaattatatcacagaaatttatgaagtaacaaattgttatccttttgtcatttgcagttctgatcggttttcatttttgtgcttgggtgatgttgggattgttgaaagcttaacgttcttttctaagaacccccttagataaacaataccatttaatgcagaatgttataaaacaccggctatatttcctataacactgagaatgtagatgtttttggtttcagtaaaagattgtttgacagtgcatctttaaataatgcaatattgacctggcttgcacattttcagaatttccaataataggaataaatttttaaaaacctattctcacaagttctgatgtgttttatcattaaagtaaagccttgtagatagctgttgtgattacattttattgagtccagctgaaatccttcattcttaggattgatgtgttgctatttcctcttccagtggtcattttaatggctaacttaattttttttctgtattccttctacagtaacatgagttgtctgcttcttattgtggaaaagttagattaaatctccttttgtacataaagcagggtgtttattacatcatatttaatgacaacattgtcaaaggaaatatgcatctctgtggactggtagtatccattagaaatagatttttctggtttttggctggctgaatcaagcataatctcacttatgaaatgttttctgacttgttgattctgatgcatatcaatgtatcatacaactattttttatgcttctctggctacgtaattccaaggccgctggcaagaaccagtaaatcttacttacagttgccaaattccattttcttggtcttttgtccctaggctgccctatatgatagcatttctcacatcaaattgtaatatttgtttacatattgtgttgtttactgttatctcctgaagatgagggactgtgtctttttattcattcatgtaacttcagattctaacagagagctcagcatgtagcaagagctcagttaatgctccatgagtgatgacaggcagacccgggtttatggagaaaatagcttgcaataggctcttttgagaggatgtcggtcaatgaaatttctgtccaacttgaaccagaccaaaaaacatttatctaaactgtgcagccttgatgatgtaaaactttgaagttcgcattttgaatataccaccttacctgttgatgttgtatttaattatgtacattgaggcaacctaatgaccaaggagacaattattgagagataatagcaaagtacagtaattatttgctattaggattaggttgacaaggtttgcatttgactcctcaatagctgtgtgatcttggggacagttttttccatgtaaaaataaatttataatgtttaccctactaacctgatagcattaggatattatgaagctgaaattagatattaaaacattagtgaaatagtatttttctgttcaaatatattattatttgcgatttgttctaaaagtagatctttcattaaggaaaaggtaatagaatcgtgtgtgtgtgtgcgtgtccatgtgtgtgtgtgtgtgtgtgtgtgtggttggaggaggtccttgcatctcaaggtactaattgtcttctattttgaataaaatctagtccaaaatgtattttgacaagagtccttcaaagaattatgctgggcatggtggcttccacctgtaatcccagcactttgggaggcagaggcagtagtattgcctgaggccaggagttcgagaccagctggccaacatagcaagacccctatctccacaaaaaacaaaaatattagccaggcatggtggcacacacctgtagtcctagctacttgggaggccaggataggatcatccctggagcccaagaaaatgttagatggcttgctatccaaaacatatctattcactatcctttctttttagtgctatctgaatccaaaaagttaaaaacgtaactgcatttttaacctttttatgtactaaacacatggatcaaatcctcctatagggaatgatcttgcattacctagggaaacactacatgttacttgcatttccttgaaagactgagtttttaaatgctttgggtgctgatgtttgttctctgaagttcatttcctagtttggttactgccgtaccatggtcattgtacaacccttgctcagaagggttatttggctaaaataataatgacctttctgctatcagtttcttctttcttaaattgagaatctcagccactgtatctgttgaaaatgctgctttgagcaaagacccctcactgtttgaaagctaatacattgcagaattcgggtaatgctgataagtagaatcagatattacttggtgctgagtagaagagtgcacatagattataagctctcatagctgctgttgatatactgttgagaatgtcctatctgcagaaggtatttggaaatgactttatgatatgtacacatataacacagataccaagatactttgcctttttctgaatgatggtggttttaaaacatggatatgcttatctatttattagataatttcactatatcaggaaacagtggcttcttatttattcacgtatttgtcacacatccaatgagtgttcacagctatcaggcttcactagacttagaaatacactggggtgtttaactgctgcaattccataatgaaattattaattctgtaatgggcttaattcaaagtctaatgctgttttaaagtccagaacaggtaagaaatttaaacagtgctcactttgatttcaatattgtctttgtcataatggtttttccaggcaatgggctggaaaatatgtcagagagtctgttcatattggtcatttgagcatttagaaggagttagctttctcttttgaaatcttcctgttgtattttttgctgcagagtctgggaacctaatttgaaatggcaaaaacaaatagaacaaataaagatcacaaatcactcaccaaaacataatccaaagaaaatacaaatgcacacaacacattaatgacattcatttaaacctagtcaagtgctccttctccaattgttcctcatcctgcacttgcttttttgaccctacagagaattccttttctgcccagttccatagatacctctggactgggttttctctctcagctctcctctttctactcttgttctctttcattctcccccgccaccatttctcttctcccctttccccttcctggttctcttcttttatatttctttctttgtttctctgactctttcccagttcctgtacccatgtctccttagacatttctaattcaaaggaagaggtaagaagaggcaacatatcagacattcatttctattgtggtgagcataagtttttcttctaactatacagctttctgcagccgactctatatcccccttgaggaatctctagtatgagttgtgattctgtgtatacttggagaatgaaatttgaggtttctagaaataatgcaggtgaatatcacttgatgaaagacaatcactgtttctgtgtgggggctgttgattttgattttaaacaatttacaactagcaggtgttttctgaggaaaacgtaatgtgttgagtgtcgattgaatctcttcacaaagcccatttgggtgccatcttctcaatcttcagatgagggacagaggtacaaagaagccacctcacttacccagtctcacatagctaagaagagaagggccaggatttggacctaggaagtctgaccctagagacgagattcatattcaccccactcctctgttcctctgagcagacctccagatcggtggtgagttgtggctgagtgagagcccagcgtggacgctgaccctgtgaacctacctagacccgatccacctccagatcacagcatctctctgagagtacatctgcagacaggcaggagaggggctctctgtgccaaggtccttttctttttaattatgattttcttttttaaaaaagcatctatttttattttagattgggggggtacatgagcaggtttgttacaggggtatacttgtgtgatgctgaggatcaggtttctgttgatcccatcagccagatgatgaacatagtacccaataggaagtttttagcccttgccccactccctccatccttggggagtttccagtgtctattgttcccatctttatgtctgtgtgtagccaagatttagctcacacttataagtaagaacgtgaaatattttgttttctgtttctgcattaatttgcttaggattatggcctctagctgcatccatgttgctgcaaagggcaagatttcattcttttttatggctgtatagcattacacagtgtatagctaccacattttctttatccagtccactgctgatgggcacctaggttgattccacgtctttgctattgtaatagtgctgtggggaacatataggtgcatgtgtgtttttggtagaagaatttcttttcctttgggtagatatcaagtaatggggttgctgggttgaatggtagttctgtttttggttctttgagaaatcttcatactgctttccacagtggctgaactaatttacattcccaccaacagtgtgtaagtcttcctttttctctgtagcctcatcaacatgttattttttgacttttaataatagtcattctgactggtgtgtgatgatgtctcatagtggttttgacttgcatttctctgtgaccagtgatgttgagcatttttttcgtatatttgttagccacctgtatgtcttcttttgagaagtgtctgcttctgttgcagtcccgtttcacagtggattgtctttatttccctatgcatggtagcacatgcctcttctgtaccattccttcattgcattgcttttcagagtccctttaagattccacatggcatttgatagaggaaaaagtataaaatgtttgaaagtgagaaagagaaaatgaacataaatataagtgcagttttgctcttttaatccatgttggtagagataacactttttctttacagtgatgtgtgagataaatcttctcttttgcaaagtacactttaagctgataaacttacagtttcatgttgtgcactttcctgctaagtcccagttgtacgccacatgaggaggcgaaaatattgttacaggaggcgtgattacacttatttaaaccatagaacaaattttactcaactaccactaaaggaccaattactttaggtcaaattgttagttcacttatgtcttcagaaagatggaaatataaatgatgctaaggatatttagggtagagagtttatgtgtttctattgccttaaaaaaacacctggttattttgttttgctcattgctattatctgaaggcatgttcataagaaataaataatggtggatgggctgtatcacatttttattagatcaaaagatgtttaattctaggcaaatttcttatggtcaaactgtaagtctaatcatttttaaccaatagtctagtcattctctttaacaactgataaaatggtaattttgtttgcttatttgtacaccaaaaccaaggtctgtcgtgtagctctaacaaattatataaccacagacttgagttgatttatgtagaatttaatttgatggaaattgtgaaccaacttgagatactgataatactgtagtcatgttgttttttaaaaatgcacacttagtattctatacacagctttgtaagtaatttcatcccaataagttaatcctcaatttccatcacagttggaacttggtgctgtgacattgtttcttgttttatttttctcctactaaattattaatagagatttttgtcttataaatgagcaacaactaaaaacataattctttatccttttagattgttttaacaaaacttctttattgaaaaaccagaaagaatgaaggtcctatttctcctacttgtgcaggctacaattccagttttctatcatttgtatagattgcctttgtttgtgcaacaagacgtctttgaaaggaagttttaacattaaataataacattctattaattatttgccttataaggcaaacaatagtctacggttgtttcagaaaaatgatatcttcatttttgtataaatttcaattatacattattaacactaatgtacatatggtgaattgaccttcaagatcctatcagtgcatgacctgttattcctatttctgggagtgctataggcagacagccttcagctctgaaccctgtgagggaatgccctggctacagagagctgccttggccaagttcaccttcccctcttccagagtggcccaagtctgatgattcattgtattggtcagggttctccagagaaacagaaccaaagagattttttgtcagatactggcttacataattatggaggatgaaaagttttacaatcttctgtctgcaaattggagacccaagaaaaccagtggtgtagtttgaatgcctcagagccagaggcactgagagcaggagaagatcaatgtcccagctcaagcagtcaggctgagttcattcaaccttggtctacatttttgttccatttaggccctcaatgatcccagcctgcattggagaaggtaatctgctttattcagtccactaattcaagtgctaatcttttctctatttgtttgtttgtttgtttgtttgtttgtttgtttttgagacagagtctcgctctgttgcccaggctggagtgcagtggcgggatctcggctcactgcaagctccgcctcccgggttcacgccgttctcctgcctcagcctcccaagtagctgggactacaggtgcctgccactatgcccagctaatttttttttgtatttttagtagagacggggtttcgctgtgttagccaggatggtcttgatctcctgatctcttgatctgcctgccttggcctctcaaagtgctgggattataggcatgagccaccccgcccagccaatcttttctgacacacctagaaataatgtttaaccagctatgtgggcagcatgtggcccagtcaaactgatacataaaatgaatcatcgcactgattgatgtggaggtataatggcctggcctttgtggcctgttttaaagcaactctgaaggccattctagcctcagaacttcttgtggtgtcagcagcctgtcactgggccacagccagctggatttctctgcctggatttctctgcttcccctgagccctgcatcaggtagatgccaagagcaaattttgtgcatttcaaactccttctgaggtttgcttctaggagagtccaacattattatctcaacacattagattccagcctcttaaaaaggtagcacaaatgtttgaatgaaacagaacatgtggttgtttccataacaacttttgcttaacaattggcacccgttaatattttaatagttttaaccattttattaaagagttaaattctaatttcaactcagatattggagccaaatctttactacttatggaatccatttgaaaggagaattaattcttgggggtaggaactgggggatgggagaagaatgtaaataacttttctcattctctcaccttaaaattgccccgatcacattgtaatcaacaatgatgaagagtgaaatctagtcatttcatctattggcacaggcaagtgagcaagtatcacttttcagaatttaggatgtttgataatattacacataaaatggtgaagattcaaaaatatgatctgttgaaaaacctgtgttttagggctgaatgtcaagtatctctcagtgttggtgatgattcttgtctggctatgattattactgttattaacactaataataatatgctacattggcataggaatttaccctttataattggattctcacagtatacctgagagatagttattatgaacctcattacagagatgaggaaactgagagatgagagacttttcaagattatgtggggccactctcaggtcttctgacaagtctattttctttctcattccaccatctctatgcactagcaaatcaatacatacaagccttttatctctcatatctgtgacacctgaccactcacccacaagtctcagccttctaaaggggtaaaaattctgaaatggcattgtttacaaatttgctcttgtatcaatatgaggaaattctaatgccactctacagatgaatacactaaggcctaggtagtattctaattcatggcaccctaataaaaactattttgggaggcagatcccatttcagtgacaacttcctctgaattgtcatggcccaaatattttttttacttcttttaatgacatctacttttaaacatatatttacatgtagctatttgttcccctacttgatggagaagtctttgaaagcagcactgtctcatttgtatttctctatcctagcagtacctgtcacaagtcttgcatttattcattcaacaaatgtttgttgaagtctatgtaccaaacgcagtgatacatgttggggtatactgataaatttgaaagacaaggttcaatactcatggatttctaattgaagaagaaaaagaaaaagaagtaacaaaaaaaagtaaaattaaaattattatgattgctgcagtatgaaagaagtggaagacaagaacctcagaaaagtcttcctgagaacatgcatcaacagaaacaattggaaagtttggagggtagactggctatatgctgaagaactttaagtcacttctataatctgcatagattccaagtattttaattaaactcttatttaggataacagaaggactgtatttatgtagctgtcaattagatttacaagggacaactggcagggttttaaaaaaaaaaagagtctttaaatttgctttatcttatccatcaatcatttgcagtcactaaaccattaagccacaggtatagtcaattgtggatgggtaagatgatggaagaagtccagacttagaggcagacaaatctggctttgaacctggatttcagtatcttgcaagccgttggtacccctgtttctcattttccttatcagaaagatggtcatgatgcaaaccttcaagttctgccattaggaatagagatggtgtcattgagtaaatgagactggaaaggagtgatcatgtgtattgtaaagtatacataaagtgttaaattcaacaaatgatctttaaattattgttaagtaaccagaaggaaaaaaaatacacaggctgcaaggaaactagccaggaaattctagaaaacagccaattataaattccttcatataacattttgcctgtaagtactaagctttaaaaattacagaacagtaacacccctgcagaataggaaagttaaagtcccttaaattgtacacaattagtaatctttcagactgagacatggaagaatagatgtggtggacacattctttgatgaagggcaacttctcttcctcccacccaccccaggaatttaaatcaagacagagtctctttaaaaagtcaagcaatggatgtggagtattgtatggaaaacgtatctttgaggtctgaatctttgaatttcattttattttttaaaccaaattctaacagtatataataacctcttcctcttatgaagtcataggactattttaggggatgacctatttgtcatttatgactgaactgtggtgtatcttatgctgttatctgtgttacctaatttacacccttgtctgacatttcttatgtgtacatattgtcattcaattatatcataactgctgaggactggcggtctttgtctgtagctcctgaaacatagtagaccatgagtgcttatgaacagattagctgtctggtttttgactgatatgaagaaagaaagtgtgaatgggtatcagggttaaggaaataatcccagtcttctaactacaatcatttgagaaataatttatctacactttaataaaatatacacaggcaccaaacagcacaatgccatgtggaacaggttctctacaagcatttgttcagcttaaatagattaatagtccagtgcctctttccaggaaaattcaaactgaccaggttgaaagatatgaggtgaggtgtgggaatagcaaaaagtgaaatggatttaagctatgttaaaattcaactcagctaactcagctctttacaaacaaaaatgtttaataggtccatggtgaataaataaatcaatgaattcagactaaactatgtttggattgcttgtttgcttcttctgaaacagtaataataaaaattttcagaacttaattttttatggctacagagtcagtctcagaatgatactcagcatataacatgtctttaatgggatgcttaagtaatcatggcaatttaattaaaagggcagtcatcttttgaaacagctattgttccctatagagtgttacttcatgttacatttttgcagttacctaatgtttccactcacggaggttggtttgtttgcattttaaataaattatacatagtcttcaacttacctctagacttcattccaaaagttttctcaaaatatttaatcactcctttcctccttctccaaacctgatttttttcagagttctataattcaccttttctattgctgatttaaatattctctctcagtgacctctttgccccacaacacttcaaatacctaacctatcagcccctgacgaaagtattacaattcccttctctctctttagctccagattcactttttcagtttgacattccatgcatactttgaagacaacctgcttccaatcaaaatcattctttcctcctccttatcctcctggatttcccacttgtttaatgataccatcacataactggtcacaaagaccaaatccttggagtcatacttagcggtttcccattgcttccctacttacatcaaatcaatacaaagccccattgattctaactcagagattctgccttagctccagctgctcctccccagcaccagtagcgctggctcagtcatcatttcccactgcctattccaatacctccttgcttggctcattgcctcctgttcatcccacttcaggctgccctctgtatcagcgatcgtcatccatttttcttccgtggagtgcaatgctcatacatgagacatattcctatgggccactcaaagatcgaagaaatagaaacatttagtgagaaagttaagcatttaattattcatagtcttccacaggccctgcagagccacacacaattggacccttatctccatctcatttttgttgcccactcctctcaccctcattcactgactcccctggccctttcctgccctttcccatgctctcatccttttgatctcaactacattacacaactttagggtggctttccctgagcagtcctcaatctaaattaaattcctttgctcttcctcacagggcttattataatttataattatgtattatttcttcttctgcctcttctgcttctgctttctccttctcctccttccccttcttccccctccttcctcttcctcctcctccctcttcctcctcccctttcttcttcctcctcctcctcctttctcttactcctcctcctccatctcttcctcctcctcctccatctcttcctcctccttccatctgctcctcctccttccatttcctcctccttgtctttctcctcttcctccttcttcctcttcctccttcttcctcttcctctttctcctcctccttctcctgctcttcttctttctcgtctccattctttttctcttcttcttctttctttttagtttgcattaagcctgagttacccacaatatttctgaattctgtgaacttagagaatttcttttattcaccattgtgtccacagcacccacacagtatctagcagatacggggcactcaagaaatatttactgaaggaatgaatcaattatcacaactagtggtagtatatcggtagactagctaactgcaggtagtgacacagcccaatctgtgtattatgggcaattcccacccctgggatgcaaattgtaaggttactaagagtcctgctattacaggcataattttgaatgttctctaacttaaaagaaaaatagttttatatactggcaccagttactcatacatctgctgtacatattaggtccgatcacagcaccctggaaatctgtcatttggctaccagacgtttcttctttgaaagtctacctaaagcataaagctcagcatatatttctcctgctgatgaacctaatggatccccattgttttcaaaataaagtccaagttatttgatgtcttagtctctttgaaatgcataataaattattataggagaccagtgcggtgtggtggcatgtgcagagtaatcccagttactccggaggatgaggtgagcaaatcactggagcctagggctttgaggctacagtgaactatgatctggccactgcactctagcctgggtgacagagtgacacccccatatctaaaaaataaaaaataaaaattatcatatactgggtggcttaatcaatagtaatttatttttacagttctggaggctgaaggtctgagagcaaggtgccagcatggtcaagagctgatgagggccctcttcctggttcagtgtctttttgctgtgtcctcacatggcagatggtgcaagaaatctctgtggagtcttttttataagggcactaatcccattcataaggactccactctcatgacctaatcacctcccaacagtcccatctcctaatactttcacactggggattaagttttaacatatgaacactcagcctacagaatttggcatgtctaacaaagccgttctcaagttggacctggtcattgtttccaacttcaaacccagccagtctctaccataggccatgatcatgctaggtttttacatactttggcctccaccagacatgttccacttttgtccccatgtggatatatatttgctctttaaaattcagttctctcaagcactttagttactccttcttctgtgttctgattgtattgggtatcctattaattatatactttattatctattccatggtaacttattcaaatgcctatttcccagactaggtggtaactcctggattagactgtgcatttccaatgttgagcccagtgcgtagaatataatggcatccaataacagttggatgactgagtgcattggcaattgtttggaagtaaaaatgcctttgcctactgaagcaatgctataaatggtgatttaattcttagctgactaaaaaaaaatactgtttataccataatgcagttgaaacctattactaatattgctttctcatctagtttcagaatgttatctctgtttcactgcaactgggggaacctctttcttctcctcctaccccagcccagaggcagagatcttttctatacttttctcttttgtccttcattgcctaagaaggagaggccaaaagaagggttctgtctttttatttgcagtgaaaatgagatggtatttctgccatttcgattttcatagtggcgatgtatgtcaatccaaagttggcatctttggggtttgcctgtgtcttacatagccttgaagaccacttgtctcataagacattgctatgctgatgcatgaggatcttgctgcagttctattagctatacaatgaaattaactttaaaagaagtctaccagtaaataaaagtaacaaaaggactttgctacttaataagggtctcaactataagacatattcatacttttattaattctgtcacttgtcctttggcttatgttgcataaatcaaaagatcccttcttctttccatcttttgactctcatcacacatcttatacaccttggttttcttagctatatccacaaaaataatgtttaaatattgggaaagaaacccatgtctgattaataattgttgtcatttatttggtgaatatattataatgcaaacaaacaattgctcttaataggtgagagtgacacatattttgagaaataatattcatacagaagtatgtgcttttataaagtaggtaattgggtttgctaattaaataaatgctctttctgaatcaccacctcccttcttttttaaataggtggtgtttgcattgctcagtcacagaaaatcccacgtgaaccaagacctggagaatttgaaaaaattatcaaacgcctgctagaaacacctaatgctcgagcagtgattatgtttgccaatgaggatgacatcaggtgctgattacttttcttctgtatgtagggtcagatttgtgtcccatatcctctttctaacatatttcatgttcaacataaaagcttgtaattgccttccaataacagactgccttctagtttgtaaatctgaaatacctacagagtaaaacttggggaccaaatgagataagacaaacaaaggtgatagacagaatgatgtgaatgaggttaaggataaggctaattaacatatgttggagttagtctctgctatattgtttttaggagatgataagactcgggcagttagaatgatcgtcttaattgttaaacagtgacctactgagtgtatacaacttcctaaatctggtcttgtaatattcataattgtggtatttttaatacatgtgatatgcattatttatttttattcctgtaggaggatattggaagcagcaaaaaaactaaaccaaagtgggcattttctctggattggctcagatagttggggatccaaaatagcacctgtctatcagcaagaggagattgcagaaggggctgtgacaattttgcccaaacgagcatcaattgatggtaagaatgcaccatagagaatttgttttattccagttggatctgaactcaaaggcaaaactggagtatcataatatgaggaaatgcactcattactgatgacttgatacaaattttagctttggtggcagaattgtcaagaccagtatttaaaccagcatgcatatgcatatatatatatatatatatatatatacacacacacatatatatatacacatatacatatatatatacacatatacatatatatatacacatatacatatatatatacacatatacatatatatatacacatatacatatatatatacacatatacctatatatatacacatatacatatatatatgtatatatgtatatagtgtgtgtgtgtgtgtgtgtgtgtgtgtgtgtgtgtatgtatttaggaaagaggacccattatatttttttaagaaaaagaccatagtcagttatttccattatgttagtaattgcactttgagtttgagtttgcgtatttccatgggtatttatggtggttatagcattgttggagggaaatgcttgatttatagaaaatgaatatatatgatgctgggcttatcctatggataaataaatgcaacaggaaagacttggagcatcctgaaaggcagtctatcttctaaacatcttttccagtcggtttgacagtgactgaaattcccatcttaacattatcctctggagtaaggcattatttccagggggtctcccttcaataaagtagttacctgagcaaaccgacacttgagttcatgactccataagatgacattaacatgattgctttattgaattacctgaaaacagaacatataggaaggagaaattttgaagtatgtggaaacacaggaaagtctggaacattgatccatgctaggaaagagaaaagaatgaggcaagtttaagttgggttctaagtattcaggattcagcatgaagtcactggttgctgcctctgggagtagtagagtaggagagggtttaagaaggtcgctgacaccaggctttcctgttgtacttattcatagagccaggtgcttgggtactggtggtggtgtggggggattgtccattgatcctccttgacttttgccataagagaggccttatttatgggctactggctttctctcatttgttatgtgttttgtttttttcttttcatgcagtgatcagaatataatgtccattcgaaagttctgacaatatttaattttgaaagaatattaaaatcatacctttctcctttgaaataggatttgatcgatactttagaagccgaactcttgccaataatcgaagaaatgtgtggtttgcagaattctgggaggagaattttggctgcaagttaggatcacatgggaaaaggaacagtcatataaagaaatgcacaggtaaccactcaaatgtttcctgtggtgcatttatttcattttcatttgttttcattacttgataaattacgtttttctatatggataatgatgaatgtattttctattttttgtgtctttttgttatagtgtctcagggctgagcataccctgatcattcaacaaacttaaatttgtttattggttctttcaatggatcagcaagtttttattgaacatataccatgcatacagtactggggtatctgggaaacatttattgtctactttggaaaatgtactttattaggtttgatggaatacagacaaataagacatggtattgctctccaggggttcaaaatgtaatatgtatcatgataagttgctataagacagtatttttcaactattttaatcgctgtcctctataatactattattttcttaaatcctgcatagcagctatcctggaacatgtatgatttttagatgctttactttccatagcttgtgcttaaaaataataatgatattgaatatgcatttttgaatatatgattaaaactatatttattttcagatgattgtgcacatagaaaaaaaactcgcataattttttttttgagacagagttacttagaactgagcagtaaatttagcaaggttacagatatgaggtcaatataaacattcatttttaatatacgtattagaaactaacacatagaaaatgaaatttaaagaatactgcttatagtaggatcaaaaacatacaacatatataagggtcaattttaacaaaaatgcacaaatcctttacactgaaaactacacaacttgaatgtgtgttttagaaatgattcattccttcttctaccctgccacccccagactttgatatgtcctcctttccctcctcctcactttctttggaaatagctgttcaaataaaagatgtaatatactaaaagctagcacagacatataaacagagacagaacaaggaggtggaaatgggtgccacactgtggaagaatctgatttcaggcttccatgtgccaggcacttttccaggagctgggttgagtgaagaaaggcaatattcatgctcacgggcttacatttgagtgtggggagatggacactccataataaacataaatgaacagatgtgttcagatgctgagatgtgcttagaagaaatacaacagattaactgtgaaagactaacctgggtattaggaggaggaaggtaattagactgtgtggtctgagtatgcctcgccagaggaggtgacatttgagataagacctgagtgacaagaagtggtcagtcatgtaaagatatgacaggaatgcatgacaagctctagcgccagagtaaggctcttttgttcaaagtaaaggaaaaaaaaaatagttcagggaggttggagcaagagtgaatatcgcgagaggaagcgtgatgacagctgaggctttgatgatagtctggagccagaccatgcacagtcttgaagttctttccagaagttccagagttgaggaatttgggctttattctaccggtaggacacaatgtcttgaggctcttcatctagagaattgctcagacactcggttcaagaagatttgcctggcagaagtgtgaagaggattggggttcaggggagaaaatggaggcaggtcaatgaggactcatccagtatcctggggacaggccatcatggtctaagaagagctaactaggggccgggcacggtggtgcaaacctgtaatcctagcactttgggaggccgaggtgggcatattgcctgagctcaggagtttgagaccagcctgggcaacatggtgaaaacccatctctactaaaaatacaaaaaattagcccggcgtgtggcgggcgcctgtagtcccagctacttgggaggctgaggcaggagaattgcttgaacccgggaggtggaggttgcagtgagctgagattgcaccactgcacccagcctgggcgacagagtgagactctatctccaaaaaaacaaaacaaaacaaaacaaacaaacaaaaaagctagctagggatgtaacacacaggacagacgctttggtacgtagtgttatatttatctaacgctacatagtgttgtgtttatataacaaccagctgagtggttgatgctggggcaaagatcgttaaatcatggaggatgctgatgttaaacctctatcagggaggtctaggaaaatggtgatgtaattagttaacagaggaaatataaaataaatagaatggttaggtgtttgggaataaacttgaattttgttctgagatagccccatgaaactggccagcaggtggcagcataaggtctgggaccccacagacagttcactaaaatttgagattaggaagtcttggagattttgaagttaaagacaaaagcagagatgcaattgccatgggagactgagaaaagatgaggagtgatgactgagaattcaagggcaggaaccaggaaaggacactgagaatgctgggcttgggggaaggagatgaactgggagtcaaggttgtctcagtctccaggagaaagacaggtgcgtgaggtttcagtgctgcagggacttgcagctgagagataagggtgtgcctgggtaaccaaattagaggggttgagagagaacagaatagaagtggaggaaaggatgctgtttcaagaagttttgagagaaagaaagtaggtatggtgggagagcttgagaaagaattggagatttctttaggatagggcacatttaagcatgttttcagaaaaaaaaaaagaagggataactagtgaaagagaataaatgcagagtaggatcttgatggaaactttaaggagaggcattaaagaccaatgttacctttaaatcatgtgatttggttgggggaaaagaaggtacacacaaacatatacgtaatcagagaggaaagttctataattaaatgctaaatttggatatagataattagggaagttcagaaaatgtatgtaagtttacattgtaaaatccaaagctctgtggaggagatgagtgtttgatgacaaggatttgggaaagacatccaagatgagaagaaatggggagtcagcaggacaaaggcatggagtagggtgtgacgtgtaggtgcgtgaacagcagtaaaaaggtccagcttcttggagaggaggatacatgaatggaaaatacaaagtggcagtttatagatgggtttggaaggagagttaagttaagcacttacatgctttccactgagatatattttacactatgcttaactttgagttctgaatgttattgtttgattctctttaaattcatttcctgttatttagactgtattagtgaaaataccccagttaatgaaatggatggactcatacacacacacacacacacacacacacacactgttaaccagtcacataactttttaataggctgttttcagaataaccagtttctccaaactcatattttctttctttttttttttttacactcgtaagtgggagttgaacaatgagaacatatggacacagagaggggaacatcacacagtgggacctgtcagggggttgagggtgaaaggagagtgagaattaggccaaatacctaatgcatgcggggcttaaaacctagatgatgggttgatgggtgcagcaaaccatcatggtacatgtatacctatgtaacaaacctgcacgttctgcacatgcatcccagagcttaaagtacaataaaaaaatcatattttctaagttcagttgaggtatgtagctgttcctttagcatctgtaggtggtatatgactagacttttatttcaggcacaaatactgaactggtttgtggccgaatccagattctgtggcatgtctgcctccaattcctttgatttatttgggtgttgctaaaattataacaatttgtccaattagaactatttctagtgcaatgaaaatggtgtttactccaagtgctagggcaaatgcacccctagggaactgggtcagtaaacagattttcatgcaaattccattgtgggtgataccaaaataacttgtctctgggtggaaaacaaataacactaatttaattttttaaaaaagcaacatatgacagttttcagatgataagagaagatatttgtctcccaaattaccattttacccagttttcatttctgttttaggggagaagggaagatgatctggcatgttagtggtcaaatgtacttgaaaggaaaaatttacaggatattcacgagtagaggtgtccagcgtttgcaaagtgctttaaaatgtggccttaaaaagtttgcattttaactacctgcaataagtcaaaaagttaaggcactctctgaaagtgagatatccatgaggccctttttgttcattcagaacatcattggtaggttaagttatatgtgttgagtaacattttacattaggcgacggtgatctgcgaacgtaattatttgcttccattgggggcaaaattggcaatgtatttacttggatgagagagtgcttcccagcagggagggacttctgtcttaccagttttccagagatagaacatcttcaagcagtgaggagcatttcttcctgaaatttactcagtagaaacagttttctgagataattttcccctctagaatctcaggaaagctttcaaaaagatgtgatattactgctaacttttgatttgctggccaaattccaagtgaggtaattcctaccatccacttagctatttatgtagttattattgcttctgagagctgctgagttctgaaagctactactacttaatcctacttaaaattccctttgtctttctcgagaagaaaaaaggactcttttatacttgttatcagtggtgatgggtgttattttatagacttttatctgacctctccctcccttccttcctccctccctcattgtactctcaggcttagtgtctttccactctccaaaacccagacacccacagactctcttgagaattgcatcttcatcctctccctgtctttacacatttttcacacacttatttccccactcagtcctctgccacaattcctctcccttcattgcctcattttttctcattcctatctttcctctgatcagtcccttacttgaccttgttttgtccagcaatgttctcattggcagtagagtctttcttcagaagttttgctttactttttaaatgactgtcattctgatttcttgtcttctatagtgaggacccaatagtgaatattgtagagacctgagtatgtgggttaagctgctaaacaaaagccagctccctctggactcaggccgggtcttttccttcctgtctccatcacgaattataaatagctctgtgcttatcaaaacgacatcccttgactgatccagtaaatacagttgattccatatcctatcttaaaaccttcctttgtttcattcatccatccattcattcattattcatttagttgtttatacattttgaagctcaccatgtgccaggcactgtgcttcagatagagagacaaacaacagacctcccttgctctcaaggagctcacaaagacatatacactgtcttgtggaatttgaggtgttttctttgctgggttttaattctcagccaggagactggggcactgctgcttagcctgcatacagctgacactcagatacaaaatagtggtgagcatatgctatgcaaaatggcctattgattcttatttatgatgatagaaatagcggtaatggaaaaagcaacgcacaaatatgtttcttcccacaaacaagcaatcctgtcagtgaaccaaatagcagcctcaataattagctccctggaagacctgtcagtttattttctggtgctagattaactatgtaacttttcaattataactacctctcagcaatcctctgttttgtaaagttatgaaaggtataagctctcccgtattcactcaggacgcatagagaccatatgaaggaagtaggtagtcatcaagggggatgaatttacataatttgatttggtgattcagagtgaaagataacccaggtaggttcccctgaattaaaatgcgttctgccatccccatttgtccccttgcctagagtaaaactcttggggagaatgcctttacgtgagcactaccaggtagccatccatatgctcttgttcttcgcaagtaaaatagcagaaatccaaggatgacttatttatgctgtttctgagatttcatgttgaatttcaatagatccatctgagatgacaaaacaggcattgatttcagacatactagatttcagaatttagagctgggatgtaaaataagaatcaatctcttgttttctagtgaagaaactagaacccagagaagtaaagtgaattattgacaaatcacagtgttaatctcagagctgcagccaggatcctggtttcttttatttggatttgtccttgacatttatatcctccatttattatttacttatattagatattttaccacatagttgaaaaatattttcctgttttgctctttatgatactttatgtgtgatggaatacattttggaattttaatcaccaactataaagtgaagcaaaaataacatattggttattacctaatcctttataaagtagtaaatattttaatattcttcacattgattttcagttatacatgtagtttttgctagtgggtcttgaacagcgtaaacctttacatccagttccctggccccttgccttgtataagagtagacctatgacaacattaagcaaaaaacaaaataggagaaactatcaactagaagttctataactctaagtccaatgacattgaattatagcagttcacattgctaaattagagttagtttactcatttattcattctcttaaagaaaaatatctattttaaagcaatatgggaagcactatgtctaacagcatttctagaatgttagcatgcacacaaaccacttaagtaccttgttaacatgcagattttgattttgtaactctggaggtaggcattctgcatttctgatgagttccaggtgacatggatcctggtgagctctagggtatactttgagtaacagagaatattagagttagtttgtaatgataaccatagcacctgaagctaaattagcaaaataaacattcaactgtgctaaaggttactgataaactcaaggtgtcttacagaagatcgtctaaacaagacttgacctatacattgtcaatgcaaaaacatgcaatcagtagccagctttatatacttacttgagtatgtattcaaatcagtaaagtataataacagagtaatatgtatatatgtgtgtgtgtgcgtgtttttctcattagtaaatttgaaagtgggaagcttaattactaaattactaaatttaaagaaacgtacacagatgcacctgtatcttcaaagtctgcaaagcagattgtaaagtttgccatctcagaaacaaaaaatattctgaacacttagaaaactgtactgtcaatcgtaaatacacatagagtggaggagttgaagaggtccttagagattatttagctcagtttcctcactttgcagaaagggaaattgaggctcatctggtcaagttggttgtctaaagccctgtagctacctaacgatgataggactgaagtctgatttgatacttgcttctttccttcatcctttcctgctctgaagaactttaccgaagtggggctgagttgcactgacccattctactatttttcctggtatatgggccagtatgttttttttcttggccacctaaggtgaagtattccctctttgtgaaccgcctgacttctgagggagtcagattgatgcatttggtctgagaaactaacatttttagaagggaagcaattctagttaaaatttcgagtacgtaaatactcacattttttcagaaaataatttaaaacagaaaaatgctcacactacagagagaaaaaatgaattcaggagtctaggaaatcctttctgcaaaacccacaacagaagctggcattatcttgattgattggaagatgaatgtatctgaataaacacaatctctggaatattacactgaagaactcacaaatggaaaagagtatataggcaaacaggtgacagttcagcatttttgatcaccaattatttgaaaaactatggtaaggcttgggccagagaggatgagaaagtttagaaaaatacagaaacattaggataaattgtcttcctttaaatggctattaaacttcagttgagggaaccaattcattaaaaccaaacaaacttttaaaaaggaacaatgtatagatgattcaatatcaggaaaacttgatttctcctcttttctaaaagtgatacaaagcagataaatacaggagactatatttcaaaaataatatttcttctctatgttttatcttgggattctttttaactcagaggatttgagagagtctcatagatatgatttgctgaaatacaagagaattaccacaacttcttaggaacatagctaaacaaaagaactagctgaacaaaggattggatacagtagggcaaaggagacataaagtgtgattagagcttactaaggctaattgagaaattaagactaagtgtgattagagcttactaaggctaattgagaaatcaagactaccgaagagtcttgatttttttttattacttatgacatttgttaaactctatattgtgctaaacatctgccctcaaggagcttatattttgtgaggaagataatagtcagacaatagtttgtaagttgctagtaagcagggtctgtatcctcaggacttagcatatgcttagcattatatatctgttaagttaattaattggtctataatgtatggccagatagtcctcctgttcttcattacagtgatgtagatatgatgcatggtgcctagcttggcatgcatttgataaatattttaattgttggaatgatattttttaataaaaggaaaagctcaacatagttataaaagggcttttactgtaatttaagaagaaaatgtactattctgatagtttgtctttaaattcctgactgcgatgctaatttaaatgggaatatgattctagaaacacatatagtcctgtgtcctataaaatcagtcaaattttattggagtatttggttacctgaatatttaactggaatatttggttacctgaatatttaattggaatatttgattacttcattataaatgccatgactccatagtgttttgtttttctaaaaaaataaaattacatttatactatttgaggggaaagcactttatttccatactacctctaatgaggtaacagaataatgaaaagacaacttggagtacataatggaaaatgtcatttaaaaaggtttcatttatacaattttaaaaatgtaaaaagttcatgtcctttgcccacttttgatggggttgtttttttcttgtaaatttgtttgaacagacacttctcaaaagaagacatttatgcagccaaaaaacacatgaaaaaatgctcaccatcactggccatcagagaaatgcaaatcaaaaccacaatgagataacatctcacaccagttagaatggcagtcattaaaaagtcaggaaacaacaggtgctggagaggatgtggagaaataggaacacttttacactgttggtgggactgtaaactacttcaaccattgtggaagtcagtgtggtgattcctcagggatctagaactagaaataccatttgacccagccaacccattactgggtatatacccaaaggactataaatcatgctgctgtaaagacacacgcacatgtatgtttattgaggcactattcacaatagcaaagacttggaaccaacccaaatgtccaacaatgatagactggattaagaaaatgtggcacatatacaccatggaatactatgcagccataaaaaatgatgagttcatgtcctttgtagggacatggatgaaattggaaatcatcattctcagtaaactattgcaggaacaaaaaaccaaacaccgcgtgttctcactcataggtgggaattgaacaatgagaacacatggacacaggaaggggaacatcacactctggggaccgttgtggggtttggggagggatagcattaggagatatacctaatgctaaatgacgagttaatgggtgcagcacaccagcatggcacatgtatacatatgtaaataacctgcacattgtgcacatgtaccctgaaacttaaagtataataataataaaatttaaaaagtaaaaataaaaatgtaaaaagttatacaaatattaaaactatatttatttatacaatttaagcattttctaaaaaattattagtttattagggttttttttttttttttttttttaccctgcaagaacatgagcttcatataggaagagattttgtttcattcacagctgaatctcagtgccttgggtggcatctggcacaaataggcttccttaaaatatttgtggattaaatgaaagaattaaattcagcttattttctgctctttttcaagcactagctattagatgtcaaggacatgttcgtgagcaaaacaaaaatggttattgtcctcatggggcttacagtctaattgggaaggtgaataatttagcccagttcctgcaatgcaatgtgttaagcgaatagccagcatatagcagggagaactgatgtagcctaggggagaagattggtgtcattgaagttgagactaaaatatgagcagaattaagaaaaagagattatcagtagtattattattttaaccagagggtggcacaaagaccagtgggcaagagaaaggatggcagttgtagagactaggagagggggataggaagagagtaaggatagagacctaggcaagggacagatcatataacactttatatgcctcaagaggcagttgaaaaatgttttgaaagtcaatgaatgggcaccagaaggttttaagcagaataatagaatcaccatcttagaaagattattctggctgtagtatggataatgtattggtgaggcataacactggaggaagggagacccatgagatactacagtaattttccagaaatgatagtggcccagcctatgatggttgcactgtactaggaatggacagaagtagatggatatattaataaaaagacattttagggatatatgtagggcttggcaattaattgcatgttaaaggagaggacaaatcatggatgatgccttgattcttggaatgggaaattcggtcattgattgaaagagcattcctgatataatgaatgattggggaagagggggaaggaggatgatgaattttgtgggagatactgagtttaaggatcctatgagatatagagctgcagatgtctgggaagggttacttggttatgtgagtctgaagctaagaatacaaggtcttgctgagacagagaattggggcctcactagtatattaatgggacttggtgagacagatccagaaagtatgtggagtggaaattgcagagggcctgagatagagccttgaggactcagaaatatgttgaaggagaggaccctgccattccagtttctgtagaaattgttttcactgtccataagtggagcccctctggccatgtctctattctacaaccctgatcctctcctttgtgtctcttcagccacaactgattgatttaacactgagctcttcactaaagctaaattatcagagtccttccgagtaatatctaaaatgggagtgaaaggaggaagattattctctctcagggggtgggaggcagtagtttgaggctgtgagatatgaggctgggaagtttccaccacaagggggaagctgacctggaagaataatattgacttgtgcaacagaataaaggtgacagatggaaagagttctgatggtgatgaggaccttaaccaggcttttcttgtagatatgtgagatagttcaaggttctcctaattatgttttcccatttttagctagcaacctagagtccagactaatacattaaaataatacttgcctcatagagcggttgggaagttaaaggaaataatatgcataaagattattgcctgctacatagggaatataacagatactgttgcttactgatttaacaacttccttttctttgaagccagcactatctaatagaactttctgaggtgaagaaggtttttccatatctgcattgtttaatagagcagccattagtgacatgtggctattggtcacttgatggaatatggctagtgcaaactgaaaaaatagaatttcaaattgtatttaactttaattactttacacttaaatgtaaatgtaactttgatttctttacatttaaatgtggctaatgactatcatattggacagcagaagtctagggtgatagacctatagaacaacaatttttaaagccattttggatcggattttctatcatttgcagctgcaagcatcctaactaatacaatgtattaaatataagtggaaatgatttatttaacatggcatgagcatccctcattttaagatattaaagaattaaatttttgtttttatatagaaattctgaattaagtcagaaggtcaatatttgcaatacacacaaattattaaactaatttctcacaggtttcctaagtaccagcttctcagtcagtgaatataaaatgtgatttgatttattaaaattaaaatgatatacagcttttcaacaacatttcattcagatatatttctacataagttgcagaattataaaacacacatattagagattgtccctaactttatcaaaacaattctcctttgggttcctttaacaacatgccctctagtctaccaaaatattattttacagatggtgggggtgtgctacttgcaacccagatagacaataattcagctaagcatttttctttgcagtaagtgaaaatctgttcaaagtgctggaagttttatcaactggaccataagacccaagaggaactaagtgtttctgttatgctttctgtgtttaataattcccagccttgttagtagacactcaaacactgcatcctagctgtggaatcttgggtgggtaacatagtctctgagaaattttgataaatgcttattttccgcatttttagattttggtggtgagagtggtggttgcaacctttatgcctgtctttcacaaaggtcactcaaattgctctggtttctttttatgttaccaaaacgctctatagctaaactattgagcttaaatgtcaaacttgcattatgtttagaaatgggtacttatctctttatgcacctttcccttacaccccaacggtgggccgacataggatatggtagaggagttagtattctgacaaataggtgatgtcattccacccatgtatcactttccattaaatctttgacccatatataacctttagctgcaggcttgtttgcttacatcactgtgatcaaatggttagaattgtagattttcatttgggaaaatgattattattttttattaaggacattattgctggtttgaattatccttttgttcatggttcatgcacaacaaagctttccctagcccttctgtgggaggtggaaagatgctctgcacctgtctcctacccagatctctttcagaaagaaaatagacagtgctagctaagctgttggatgggagcaatattcagttctttgccaacagagatcctagactccagatatgccaattcagcaaaccacagggagattatctaaaactgaaaaggggctcaagaatccatcagaatatgagataatttaaataaaatttaaatcctactggccaacagagaaccagaggacattagagaaggaaggaaacttggaggtcatcctgttcgatattttgctgagtgtcacctgtcaggctgatgtaaaatgaggacagggagtacatagaaacatttcggtttctctgattcagtagtactcttgaaggcctttattggtggtgcaaaatgaggctttctcattgactctaaataggcttattagcagcacgcagaaggatttccactgtgatcttttctttgtccctagtcagagtgaaggcataggtctgaagcaggctgatagctttggaagtgaaaagtactggcaggctgagggcacagaatgggctggctgccagtgttgggttcagcaccctgaggagtgtcatttgtcagagccacttttatgaaacagaagccctcttttgtgtatttgtacctgtgaaagggagcagtggtatagctgatccaaagtagcagaaaaacaaataattcatattgacttaggatgctcacctaccccctcttttgcaggagtgttagtttgcatgtcaatacatggacagcctccttggattctggcatgatgctttccataggggtttcattaattggtgcaaaagtttatttcagtagagtccaggaaactgttagctttttgttctctgcctaatgacagaaaatgtccctgtgactgatttctttgtgggaccagtctgcatcattcctaagactgacacaaagccccgcttgagtgtgtgggatgaacggcatgactcacacgttcccctggagaactgcaggtttgattaaatgtttaaatgaccttttaggacagatgattatgaggatgggcaaacaatttgttctttcaattcttaataacttcagtgtgtattgcgagggggaggtatatgtagacagtttggaggagtgtgaacaagagacttgggtaatcactggagataagggtgatgatgatgataatttgatataaataagcagagagtaagatttgtcaaaaaggggcaaactcattgctgttctcaatatctcccttctttcacttcaagcacagacactcacaacatgttctgtttctgataacttcctaagcacacaggaactccaggatttctcaaggaccacagccctgtggccaaaaatctttttccttgactgctctctgggcagctcagtagtatctttaacatggcaaatataaagatagtagattcactacaaagacacctcgagaaaaatactgcctgcatttgtaaaccatacacagtcttattattcaatttgtctttatggaagctatcagttagctacacgtttcctttcctatgtctgatgtacctatctctagttgattctttctctctaactctacttcttgaaacactctctgctggtttgattttcaggtgcattcatcctcttttcagattccagaatgaaaacttcctttttgagacacccagatagattacctcttccttagtccacctggcccttatccacgtcccttgaatgagttttctttgtctggacacatttctgaagtaatacttctctgcactcccaaaatacagctcttccttctttcggccttttgctgtgttctattacattatttcattgccactcagaataagcactagatagacatctaaggtttaactttacattttatatattttattatatcaaaaactggtcacatataaactgtagtacttgggaattgagggtatttcttgagtattacaagaaagtattactttcttgagaagatattactcaaaaatatatacattttggataaagaaattttgacagtataagatgaattagcaatgatgtttttcagaaaacacgtaggcagtaacttcatttatatgaccatgttattaatctgtaggcattaatggatttatgtagcctgttcagaaattaatgaagcctgttttctatggattttgttattagctccttccctcttcttttgtcttcttggcatcactgttgacatcactgatgggaatcccactactgcagccattgcaagtgtttttggtgattattgttcacttaggcacctttgtgcactagatctctgatcaaattattttgaaattttaatatgaaatacataggagaaaaaattgaaaatgtgtagcagtaggaaagcttttctttgttaaaaaagtgtaatttaatagagtaagaggtgtgaaatatgtcaggaattttgctaacatgaaatttcatcatttgtccagttgtgtacttaatggattcatcttaagtataccgtaattcctggcaataatgtggggaagctcagatttacttttcagtgcatgttagtatgtaaaatgacccctatcttcaatatctctatgttttaacacctgctttgtttttacaatagaggcccttgtttggaacaaagccacttaagctgaacgtcattgtacctgcacagttacctgggttatctgtggttgtgatgaaaattacaccaccataatcaccccaggctacttacaaggcaccttcatagaaattatactgtgccaagtgccacaaagaatatcaaaatgcagcccctgcttcaggcgcttatgtttccaaggggaaaaaaactggcctttggatttagataagaaactttattgtgattacaaattggatttcctgtttttatttcaggaaagttatatttgaaggtagaagatagctagaattgccatttatctcacccctggagggtttgaaaccattcttgaatgagtaaatgtattcaaaaatttaaaattaaatcagatttgttatatggaatcatttaaacctaatttcttaattaaagacattttaagttcactttctgttccttaggtgtaaacatctcatgctacaaaaaacaagaatagattccactgctggggtgaaaagccacgacttttcttcctgtgttctgtttcccaggcctatcaaagatatttaagtactgagttaggtctggctagggaactctcctgactgctttaggggcacagatgatagggaagaaaagagtagactgtgggggttagtcttggaatgatttcagtactcccctttgatggtgatagctgcttcctgttaggaacttctgttggaagcatacttcttacctgaagaaagttctgggttgagacagttctaccttgacttatttaccaaggcttctaaaccatatagcacatcactatgaatacactcagggtgggggcaatggatcctacccagatccctgtaaagccagcgtggttctgcaaccatcattcatggataaggaccaagactgagctgctctggttgaagaagctgttggatgatatggggtttgtgccagagtgtggtgaattcattttccaagatatgctgggctcactctcagcaaggccagctgaaagctgagtctgctttggatgcagaggtatgtagtcagtggctgtgcacaggacaggactttgggatgtacagagggatatactatccttacaaatacttccttcagctgtttgctgatgagcaagattccaggaataggatacaaggcccctaacttgtcttaactctctgattaggtcagatctccctactgtatgcccatagtgcaccatactcattttagcttttattacagttacagttgtacatttatttgtggggttgtttgatgcatatttatctcttattaaattgtaagctccatgaagataaggagcatatctttttgcttatctttgtggccactgtgcctgtcacatagaaggcactggataatcctttgttaaatgaataactagacctaaaaaatacttcaaggtaggtgatgcagtcattaagttcacactacaatgaaagacagttcttcccaacaggacattatatgttttttctgctatcatttctatttgctaaattgactttgagtttgagaaattgggctatgatgcaatatgtgcataaaatcttcaacaaatactgtgttccatttttttaaagcaaggataaggatgaaaaaaataaaaagatgaaagagtttatttaagctactgatatccatttgttggttgaaaaaatatgtggctgtttgcattttgtttagccacagaactcccatataaacatttctatctttgacaaaggtttatgcaattgatctggctgctcatttttcccccgtgatttcctttttttaattcacaggtgaatgacatttagttctcggttgtggaaaatgctcttaatgcctccatcttttaaggagatgttcctatagctcagttactttgaatatagttttttgttttgtttttaatttatggcatcagcaaatgatttacaccatagtgttaaccagtgctcatgaggatgctgattttagcagaatcctagggaactaatagaaaaaaatcacagctaattttagtatttgtagggccttatgacagatagatctgaatactattattcacccttaataacttcttgctaaattatctgttttgtctcctgtctaattttatttctttcatgaatacacatattttatacatctgatatttcagaaaatgtgcttaaaaatgtctatttttccatttcttcattgattatcagtttatctaatctgtgtatcatccatctctaaacctaatttttggatacatatacaaccaatagacatgggatataccaacaatataattgcatgatagtcttagttaaaaagtttagtctgtctctgtgaatttgattcttctgctttgcatgattctggctgagtcctttcatctggtgctggtttttgaatacatattaggttgcttccaatccatctgaaatgcagtctcatgagaacataggtctgcaatctaaaaaaaatactttgattattcttgatacataaaacaatagctatttttatagagttagaaggaatattagagattatttatcttatatcccttttttacagattgaaaagctgtaatcaatttgagtaagtaacttacaaaagggacaaagaaaagaaccagaatgagaaattccatatgtcttcttatcatacaattcaatcctgtgaattgttgattatttgctttactactctaaatgacttatgcatgtcgttttatttgtctttctagcatcaaaatagaagaaggcctatttcttcttcttctaccagttgcatagttaaaatgaggctgaacattctcttgtaaattcagggtgtttacctagcccaggaaaatcaggcctaagcagacaaaagagacttggaatgatttatctaaacacctaaattagttacatcattatttatctgcgaagcttctcgagttttgttgtcatactctggatggaggccaatcagaaatgacccttaagatctgactctgtctagccagtctccccttgaccaaggagaacatttgggcatgaactgtagttttcattgtcctctgaccaactcagaaatagctacctgaggccagcctttagttctattttgatcaaactgtcttatagacacagccttcagccttccctgtgacctttgaaaactgccccagggtaaaggcgaattacaaatactattaaggttgatgagtaatcaactcagtaatgaggatactatttcacattcttaggggtagatgctttttctctgtgggatgcctgagtaggaaattttgatggctccaaatgtggccacaacaaacatcaggaggctctcctattgtagagatttccctgaaactgaactctggaggatgaaacatttggtgtagatacttgaccttctaaaaataaagctttatgtatgtgtgtatctatctatttttctcatagcagcaattagtctgaaatctaatgccttgtcagtgaacataacaatttttgtaaatgttctcctcttagcttttaagttttttttagcgatgagtcaaattatactcaggtttttataggttatccctagtattcttgtttcttgttattgaagatattcaaatgttaatatattgtaataagaagtagctcaaaaagagcagaatgacctcttccttacccccttagtgatacagacaaatagagtatttgttcatgttatattttggcttttatttttaaatcaaggaggttgaattagagacagagcaaaataagcaaaaacctgaagctataaatttctaggtcaatccaaatacataaaacattaaaaaatgtcagatgcgaagctagatgcaaactgacagggaaaaaaaaaacctgtttgtgtacttaaagccccaaaccaaaagcaaaattaaaatttgtgctgacccttctcccttggggctgcagatgtcactgctgtccagggcaccgtctgttactgagtggaaggaagaggaatggcatccaagtcactagtgtaagataaaattgtctgcctgccaaatcctgaagatgtcctgccatatttgttaaggccaggggatggagtttagaggtcagcaacaaaggtgaccattaacactcattgattcttgtcttttatgactcattcttttattattacatgttttgtaagaggttttatacttatacatatataatttttatttagtcagtcacagcagtagttacaattcatttagcacttatgggacaagatattttatacacagtttttcattggatgtccaggactattatacaaactgagtattactcttatattaaaggtaaggaaatagcttctaactaagcaaagttgctcaaagtgacacatagagtgaggtctgtggctgttctcttactccaaatgtgggatatctcagaaattgccatcctccagaaggctacagagtagctcagactgtgcaaattgttctccatttgccatgcccccatgcactcaacactattccatgtcttccctgtgctctgcgaagctgacccttgtcatttgcatgactgggactctctgctctctgtgtttatcttgggtggggcctatggaaggctctagcaggatattggagggcaggaagagaaagaggtcaggatatttcttcttcatgtcctacttcggtcctgtgcgctggccgtgatcatgtcctttcaggatataactcccttcaccctgttctcctctgtacctcttctgatgcagggctcctaaggaaacactgctccttttccttgactgtttatccctaagggtagtattatattctcaccattgctatcctttgggtgccctgccatcttgtttgctccttaagtctgtctacaatttatgcaaataactcctttattaaaatctctttatttgaacactctgggatgaattctatttttttttctgggaccctgactaatacagaggccatatgaaaatatatcaaagataattttcaaagcatgtttgaaagctctacattaggatcactagcactagcatgccaaaaggcacagataagaaaatacagggcatagcaaaatattgtttcttcttaatagggaatctgcctcagggaaagactaggctggtgagaagggggaaagactttaagagtcttatagaccaggcattagagaattgtgataggtttttgagcctgtgataaaagctgtgtttggggaagatttttctagcaaccatttgtaggaacagtggaattaggaaaaaagggtgacagtaaggagaacagttaaaaggcttttaaaataagccagtgtaaagtgattggaggcaagttcacaaagtggcaacaagtatgaaaaataaggaatgaaataaatagtgaaagaaacattattactattggaatttgcattcttgcccatgtgatgcatttgctttaaattggtgtaagctcttcacatgcagagggcccatatgccttgatgtaacattagatcaagtggcagaagctaaatttggaattaaggcaatatttgattgtagagaacatcattctcatttctagctcttggactttatgtggaagcactttaagtcctaagaggctaattttagttcaatctatttagttaacaatatttcagatccttaatttttagtttccagatgatcagactcctcagcttgaaatccaagggcattatagacttcaagcaaattgcatgtgcattaagactgttgaacttgggacaagtaatcctataaaagcgaaatcattgctgaagcatttttgtaatcatgtattcctcctgcatgttcatttgaaaatgttctcttttggtgtggaggcacatgagctgattatattgagctccatccaccaatttatttattcatctaataaacattttaatgaatgggtatcaggcacgtttatgttttacccaagagacttatttaacagtcattcaaccatttggtcattaatagtgaaaaggtcataggctttggcatgaggcaggcctgggtttgaaacagatcttcaccatttcctagaaaggttgtcttaaggcaaattatttttttagacaccttttcagtttttctgttaaaggaaaaaattgtttgtaaagactgcattgtgactgagaaagggcacgcaaactagatgagtttaatcctcctatctctcacccctgactaaccttatatgtctacacaaatatgcaatgctccaagttggatgtgaaacaaatggtagtataatactcgcccttaaatataatttcagatagccacaaaatataaaaccatttaaggatgtgaaaaaattagtataataaagaagaaaatacagtataactttttcttctgttatttaactggtgtaaaattaattccttgactctcatattttgtaaacaaatatgataatgtatgtggtgatgtacggctttgccttgagaaggaaaaaatatagccataaaatatttaagaaaattctggaaataagggtaatagaattaattttttcaaacatttcccaaatgtgttttaaatggctttcctgaaggagaaagagagagggagagaaaaaagagaacatttagatataattacagataagacctatgcataatattagtggacttaaaaataatcatgcatattcatagctaaattgctaattaacattctcagaattttgcttaatgtaagcaagttatcctaatagggttagggcaaaaacaatatgataaagattgaaatatgtggctatttaaaagcactgaaaacttgaataaattgcctcttcccctcccttagacataaaccattaagcctcatcatgttttttttttttcttcctccctgccccctcccccgaccccaccccaagacagagtctcactactctgtggcccaggctggagtgcaatggcgccgtcttggctcactgcaacctccaccttctgagttcaagcaattctcctgcctcagcctcccgagtagctgagattacaggggcccgccactgtgcctggctaatttttgtatttttagtagagacggggtttccccatattgggcaggctggtctcgaactcctgacctcaggtgatcgacctgcctccacctcccaaagtgctgggattacaggcgtgagccaccgtgcccggcctcatcatgttttttaaacaataaaaagggcaagttttagaagacagtatctcaaggctgggtgcagtggctcatgcctgtaatcccagcactttgggaggccaaaatgggtggataatttgaggtcaggagttcgggaacagcctgaccaacatggtgaaaccctatcccatctctgctaaaagcacaaataaattagccaggcatgatggcgggtgcccataatcccagctatttgggaggctgaggctggagaatcgcttgaacccgggaagtggaggttgcagtgagctgagacggtgccactgcactccagcctgtgcgacagagcaagactctgtctcaaaaaaaaaaaaaaaaaagaagaagacgacgatatattaagatacaacaactctttaagcctttgctgattgttgatgagttttaaactcacagaaggttttgaagaaaggctggcagaacttgaaggcagaacacacaggctgaagtcctgtctatgcctgttactaaatagcaatgtgagcttctggaggactctgaactctctcagcctctgtgaaatggagataacatttcctatggagctgcctcagagatgttggggaaatcatatggaaatcaagtatggctgtcaacaagttttgtgaattgtaaatgaccataagcatataaagtattagtcatctattcactcattcacaaatggagcatgcctagcgttaggtggtggggctgtggggtggtcattaacatggtgaatgagatctcaagaagcagtgtgttcccctgggtaagggcatgggctttggagttaaacccacctagagtaattcagggctcatcactccgtgacctcctgtcctgagaccttaatttgtccaatgtttcatcattgtaaatcccagtttctttaacgtgaatatgaaaaaacatcatatatttcacaggggagttatgaggatgtgagaagtatgatcaagcacttaacttctcatgttcaaagtgctcaatgacagttggcaactatcaatcaactcttcaaagattatatctctgatcaaggaaagcaggcatttgcaccaataatgacagaacaaaacaacatggggaagagcagtagtataaacaactttgagagttcataggtgggctgccatactttcagctagagtgataagtaaagactttggagacaggtaaatattaagaataaatcttgaagaacaagtcatatctgaataggaagagatatggttggtggaccgcatttcaggtagacagagaatagaatgagctaaagtgtagagatgagaaatttgagtagtccagttgtctagactagcactgtccaatagaacttatgtccatgaaggcaatgttgtatgaacgttctgtccaatatggtagccactagtggctgttgaacacttgacatgtggatagtgtgactgaggagttgaattttttattctatttaattttaattagtatacattttaaaaccacatctgacgagtgccagctcaaaccgtaggatacatggagaggtgtttagtgtgataagatccaaacagattggcaaactttgaagaactttactgctaggccaacaagtttagattccaaaatagaacaaacatatttagaagcaggcaaaacaaaagaatacgtttatgaaggagaccaaaaagttgcagagagagaaagaggaaggccaggaatccaacaaggaatgggcattgaagaaaggcttgtctcatactgttagttagaagccaatgggtatgggaaaaaaatttgttagatttggtaattcagagcttctttgtgactttgagaaaaaaagtttgccctgagtagtagaggtgaaaagaatattgcaggaaattaggagtaaggtatgctgaatagaggcaacatggaacagccttttttttttttaaagagtttgtattcctagagttataggataaagcattacacagtaagttagtctcagcaagtactgtatatttcccaagtaagtggagttcttgcaggcaaactaggtagtttcaatgccaggtgtgaaattttagtggtttagataaaattttgaagcaattctacgaataagtactctgagtcatgacatttttaggccacattgaaaacgctagctgaaagaatacaaacaatgttgaaatcatatctaagtcccttgctgagtttatattctgagctaaggatagattagcctcatgcccttatatgacgaaaaactgttttgtttttcttgcacagcacagttaggtatcagataaagggggaggagtatcctcatggatacctcaaaaacaagtaacccgtagacagaggacagagaaatttcatgcaaagacagattttcctatccgttatgattaaattctctcagtttcctcattatgaaaatcatttgggatacttgataaatgtacagaatcttctgcctcaattcatactggtcaatataaatcttagcttggggatctgaatttttaattagcacctgagcgattcttagtatcaggcaattttaggaaatgtttatttattcatcctttcaacaaacaccaatggagcgttttttccatattgcagacattcagatactaggccacaagataattaagacatggtttctagcctcaagaaattgttctgggagaggagacagtaaatgccatgtaagaaatggcttggcagctgttgcaaaaggagcacagagaagggcagctcagcattgaggagatcatggaaagctgtgcttggggaaggtaaagtttgagtaggatattcaaggataagccaaccagatatacagggagtgtgagagaaaagcactcttttcaggataaacgtcacattaaagacaagaagagattgtgttgggtctatgaatactactgaattcgacacagctggaaaacaggttttccatgagataatggcctgtgtggcaacagacaaaggcatttttgtaccagagcacaaaaataagtgcctagttattttcaaggtaatgtgaaatcattaaagggtaatctgggattggtgagattggagatagggagacccattaaaaacttaatacattaattcaggtgagaagtgatggtgtctgacctaaggcaataaccacagaggtagaatggaaagaacagtttttgataaatagttggtgatttattgtgtatgacataattagacgatagttcttttgatccttttattaatattgtctcaatgaaatgaactgaattgctgaataattgattttgtagatggctcacaagatacatttagccatgatggggaacatataattgtttgctattcatacctatggtgacttcttaaattggattgctattggacaagattttcagtatttatcccattgatttaaggagacaccaatgcggaggatggtctaagaggttttcacagtcccttctgtgggtatcccaaactctttgatattatataggtgaggaagtatgtattgcttactacctatttaagttcttcctagtattctggccctttaacagtttattctgtttgtttttttttttccttctttgattacttacagttgtaataccttttaaagacatttgatatctcttccttgacttattccacattcaagttaatatatagaatatgtatatttacaaaatatgttaactaaatgaattatttttgaattattttgagactttctaaattagtttgaagtatcttgagttgtcatgaaactaactttgaaaggtgctgatttatagtgacaatatttgtggccatgcaagaaaagaggcactggacattttaataagcagtttaatagaatttaaatatatgacatccaattactgacagaatacaaagcatcataaagtatgctttgcagacatattttataaattggaaaaccttaaggattcatagcatttgtgtaaaaagtgtggtcatttacacattttaatacattgattctattgtggaaggtcctgcaacatggactgttaaacaattaaaatggtcaaatgtacttccatgtttatgtaatttgcattcataggaagaaaatgggcaatgcagaaggaacattggcctagagaagcttactgaagcaagggaatttggagtgagacagacatggtttgggattctgactcttctagctttgtgaaccttaatgaataggttcacctcccatagcttccctttcctcaattgtaatatgggaataaaaatgcttacttacagggtcgtgttgaggattaaatgagataatgaaagtaaaatgtcagtatggcatctgagtcatggtatgcccagtggaaaaataacagccatcattattatttaaaaaaatcaggattaaagattctagttgcagtccaggtacaaattcatgatgatctggaacaagtcacagtttctgtcaggatctgagcctcttcgtttgtaaaatgaagctagtagactggatgaattccatatttgatgactgaaattaggattcaatgacttatataagtcacatctgaacttgtgtcagaaaatttattatttaaaaagttttattttaccccagtcatgcacctcctttataatcattgagaatgcatttaatccaaaatgatttagaggctgcaggaatgttgattctgaaagcatgatgggtatccaggtgaagaattccatcaggcagttagagaagaaactcaggaaagagggcaaagctaaaaaacatgggaatttgacaacacaaatgatatttaaagaatgaaagtgactaacacttcttcagaaacaaaaatgtatgcaggcaaattttacatttatatatatttttcctaatattcatggcaggggtaacccattaagaataacactacttactaattctaaaatatttacaaaatattgacttagaatataaaatttaaaaaacaattgaatgtccacataattctgtcataattagcagactttttatgcattcgggataggtgaggccaattactttttgagatcatggatgcattttctatctgtctcagcccaataggttgccatgttgagagcctgaacatagaatatggctcaagacaaagaaaactctagaaaaggtaaagccaggtacttagagattcacatttttggcttattcaccctcaattacatccagttaatttgaactaatgatattttctgcttattctcctctacatgtgctcattcttgagaggttgtataggatagggattggtcatttgattttggagctagatttcctgggttcaggtaactttagggaagttattttactctctgaatggtaggttacacaggcaggaattaatattagtacctactatcttaagggtgtgtgagagttaaattagataatatagatatggaacacgtaggccaaaatctgatacacagtttataagcatcaaccgttttttccttcagttattaaaataagtttcgcttctctcaagcctaaattttaaaaagttctttagttttaagggaaactaatatgcttggtggatttggtcatgttcggaatagaaaaaaattgcaatgaatatggttgtttttgaattgacctgtcaatttcatcagaaagccacattgaatgtactgtgcagacacaagttaagttgaaaagtgctccccaatgaaagttatcaaaggtgaagcaatagtaacacattccagaagaggaaaaatgcatctttaaaactgtatgtgtgtgtatgtatgcgcaggtgtgtgttttaaactggagtagagagtatgaacacctagcataatactgggaatttgctaaattctttttattaatataaaataaatgttatttataagttgagtgctttgtaattgtgtttataggaaaaaaagacatttcacaaaagttatcttctttttcttactctgaaactatgacatatgcctgatggatatagattttcattttaaaaattaaagagcggctcaaatgagtttattttcttcgatgatgaaatgctgcccggaggtggaccaagaggagtgataaatctttgatgcacctgtgtaatatatgcagtacactgctgagagtatctggttttgaggtttcagtggcagaacaccaactgcagggaatctggatattctagcatagttctgaccttaaatgtattatctactgaaaagaataatgcacagtttcaaaaatgttaacatggtctcaaaagaaggtgagtgttattttccatactttaaaaacactgtaccaaacagcttaaagtgctagtgtccctttaactttaaaatagaggcttcatttatttcgatgactgctatttagggtaccctaaacaacgtcttagtagcggaaagaattaatactcctaatattccttttggtggtgggaagtggcctctgggtaagacaaagaggtctgggctgatgacacaatggaatgtgaatggctttttccctatggttctaagcatgtgtcctccagcttctcaaacgttcttagcacttcagaatgaagaggaaatggggaaaggttaggaaagcagaaaataagagatagggcagaacagccctttgaagagtttgctcatcctcaaaaataaagacatagagttgaagttctcctgagaacagcagagtcccttcccttccttccatcctatgcacatgcaaagatcaagagcaggagtagctttcatgccaagacacaagccaaacacccagatcacttatagacatacacaagtttactctgtgagggtccctgggtgtgggctggcaatatctgcacattcttcatgcaaatgataaaatataaaggatgtttagaaccggcaaacgtaagacatcttatgaatcatatatattaaaagtattttagtttatgatcaaccacaaagttgtctcttttactgaacactttgcttttaatttaacagttctagtatttactatgtgtacaagtatctataattcttagagatggatttaatttcatattctcaagttgttttcagaagacagtctttaccatataacgcaaaatgtacaaaatagtttacaaactctactttggtcatatattggcaggctctttaacaactagaaagacaagatgttgtaaaattgactcatttgttcattatgtataccacatagagaacaaagtaaaataaaatgcacagaacattcaggataagatggctaatcttggcttactataaaatgactggcatggagccttttcctcttctttcttctgccttgttccctgaaccagtgcacacatacaatgtatactgctcagaaaggtgatttgattatttcatttccaaaagacaaatgtcgtatgaattttatcaaggttattcataaaatgtgctcttttattactaccttaaacatgtataaggcactccggaacgtctataaagactcagtatttcagaaaagtacttaacattgttaactatttgtacacttattaggaataaaatgcatacacagaacaatgagtataataagaaaatatcttcaaaatgtgaccagcttggcataggcttatagagaacgattctattcatttttgtggacttttccatctcctctaaaacccagtgagtgaacatggacttgtgtgtctcttggtgtcacttctagagatggtctcacaattccatatccaaaagtcattttcagaagacatttctttcctatgatttcttctttcttcctctttttaaataagacatttacaagatgtgggattttctaacataccttagaacttctttacatacagaaggccaagatatagcaaaataagttttcctctcaaaaaatggggggaaacttgagtgcagctctttcatatgctacaggcatgccttgttttattgtactttgcagtttttgcattttttacaaattgaagagctgtggcaaccctacatcaagcaagtctatcagtgccaattttctaatggcatgtgctcactcagtgttttgatttcacattttgttaattctcacaatacttcaaacttctttactgtaaaatctgttacagtgatctgttttcaggagtctttgatgttactgttgtaattgtttgggggcactacgaaccctatctctggttgagaaattttgtgtgtgttctgactgcttcagcaacctgctgttcccccattgctttcccttttttcaggctttcctagtccctgagccacaataatattggaatttggccaattaataaccctacaatgacctctaaatgttcaagtgaaaggaagaatcatatatctctcactttaaataaaaaaccagaaaagatgaagcttaatgaggaaggcacatggaaagctgatgtaggctgaaaggtaggcctcttgcgccaaacagagagccaagctgtagatgcaaagggaaaattcttgaaaattaaaagtgctactccaaggaacaggcaaatgataagcaagcgaaccatgcttactgctgatatggaggaagtctgagtggtctgcatagaagatcaaacgagccacaatgttcccttaagccaaagcctaataaagagaaagaccctaattccctccagtttcttgagggctgatcgaggtgaggaagctgccgaagaaaataactagcagaagttacttcgtgaggtttaagtaaagaagtcatctacataacagaaaagcacaaggtgaagcagcaagtgctgatgtacaaacttcagcaagttttccagaagacctagccaggagcattgatcaaggtggatacactaaacattagattttcaatgtagaagaagattccatctaggacttttttttttttttttttttttttttttaatctatgaggaaaagtcaatacctggcttcagagcttcaaaggacaagctgatcttcttgttaggggctaatgcggcttgtgactttaagtgaaagcgtatgctcattgaccattctgaaaatcatagggcccttaagaattatgctaaatctcctctgcctgtgctctataaatggaataacaaagccagatgacagcacatctgcttacagtgttgtttactaaacactttaagcccactattgaaacctactgcccagaaaaaaaggtttctttcaaagtatgactgctcattgacaatgtacctggtcactcaagagctctgatggaagtgtacaaagtgattaatgctgtttttgtatctgctaacacagtatccattctgcaacccatggatcaaggagtgattttgactttcaaatctgattattacaaaagtatatttcataaggctatagctcccatacatagtgacttctctgatggatctgggaaaagtacattgaaaacattctagaaaaaattcataattctagatgccattaagaacaatcatgattcatggaaataagtcaatatatcatgggaggagggcaaaatagtcttaaaagaaattgatttcatctcttataaatgtctttgaggggttcaagatttcaggggaagaagtaactgcagatgtggtagaaatagcaagagaactagaattagaagtggagtctgaagatgtgactggattgttgcaatataattatcaaacttgaacagatgaggagctgcttcttatggatgagcaaagaaaatggtttattgacatggaatctatttcccatgaagatgctatgaacattgttgagatgtcaacaaagacttataatttcctacaaacttagttgataaagcagtggcaagatttgagaggattgaattccaattttgaaaagtttttctgtaggtaaaatgctatcaaatagcattgcatactacagagaaatcttatgtgaaaggaagagtcaatcaatgcagcaaactttgttgtcttattttaataaattgccatagccaccccaaccttcagcaactaccacccagatgattcagcttccatcaacatggaggcaagaacctccaccagcagaaagtgacttgctgaagctcatgctgaaagcatttttagcaataaagtatttttaaattcaggtatgcacattgtttttctgatataatgctatcacagactaatataatacagtgtaaacgtaacttgtatgcatactgggaaaccaaaaatttcatgtgtctcactttattgtggtagtctagaacaaaacgtgcactatctctgagttatgtgtatatacactggtcttctattaatgtctacttaatcttcccaaaggatggcagacacatcctgttggccaagtgtggcacagtgttctaccatttctctcttccaacatcaaggtctggtgttgattaaccaacttttgtagtctcagctcattttctaggccccttaagggacagtacagagtggcatcttgttcactagggacacagtggtcacctcagatctgtgatctgcacagctccttagcctgaggctgagcagctagagctcgagtccacactggcccactctttcaactcctgatgcccctgttgggttggggttgccgtgttcttcccagccttccatgcccttcacacagtagtgttgtttactctgggcatggtgggggcccagctgtggcccagtgggtctggcttggagaggtcacaggcaggatggggattgctgccatcagggtctaagcctggccctgtgcctgagagcactcagctcacccaccagcctgagagctgggggcccagagggtaccagccaagctctatgtcttaccatgctctctgctagagttcacacctttattttcacacttcattttttctctgattaacattttatgatagaaagtatccttaggtcctgatcatatatttttttctgctgtaagctgttactaatattgaggtactttataaatacttttagattcattatggatttattactttgcttgaatcccacttaagaccttggccctggttcaaacactgcacactttttaaagcaggtagatgacaacatcttttcctgggtttcttgtcttgtctcctcctttcacctctgtcctctcatttctgttcttctctggctttcctctgcttttttcactcctctcatttctctgttggcattattgttattttttgttccaactgaccgttttgataggatcgttttctctcttcctcctttaatgtctcatttttttgatactgcaatatagaaagaaatgcagacaagaattacttactgggatttaccatgttataaagcacctctgctttttcttctttgctggtgattcattacttgaaaatattgacatcaatttccagaaatttataaaagtctccagtcaatacaactaaatgtcaaataaacctacagtggtttgggtaagaaagtgcccaatttactactttttttcttttcttgtaaatcacaacagcgaatgtttggaacaaggctgcatcggggcagtgtaagaaattagcctatgtaaatgagttttttatttcctcagagcccttcatactagtgactcagattggtgagaactcgctgacctgtttagttcttagtgggacagcactacctccttatatcaaaattgccacaataatgtctccttttagttctgttaaccataggaaaacacacacctggaaatatgtaagagaccaatgactttgaactaagattttataattccatgctttttaaagagatcgaagtatcaggaaggctgatgtctcatatcccctaatattgctgtgataccaattatgcataatacgccccaaatcatgtcattttcttgtcagatctttagtttagagaagactgttacaggtgataaccactttaaaaattaccactgtgttcaaaccatataaaaattgagtcaaggcagggcgcggtagctcacacctgtaatcccagcactttgggaggccgaggtgggtggatcatgaggtcagtagtttgagaccagcctgaccaacatggtgaaaccccatctctactaaaaatacaaaaattagccaggcatggtggcatgcacctgtaatcccagctactcaggaggctgaggcaggagaattgcttgaatcggggaggcggaggttgctgtgagccgagattgcaccacagcactccaacctgggtgacagagcaagactccgtctcaaaaaaaaaaaaaaaaaaaaaaaaaaaaattgagtcaaagtatattcaagacttgaatgtaagatctggagccataaagctcttaggaaaaaaagtataaatctttgtgatgttggattaagcaatggtttcttagacatgccaccaaaaagcataagaaataaaaggaaaaaatagataaatgggacattgaaattaaaaactttcatacttcaaaggaaaccaccaagaaagtgaaagaacaactcacagaataagagaagatatttgcaaattacatatctgataaggcagttgtagctaaaatataaagaactattacaactcaataaaagacaacccaattaaaaatggataaaggatttgaacagacatttctccaaagaaaagtatagaaatggccaataaggacctgaaaagatgctcaacaccattagtcaccagggaactgaaaatcaaaaccataattagataccacttcacacccaccaggatggctgttataaaaaagacagataacgagttttggcaaggatgtggaaaaattggaaatgtcctacgttgctggcaggaatggaagatgctatagccactttgaaaaacagtctggcaatttctcaaacagttaagtaaagttaccatatattccaccggttctactcttagctgtgtacctaagagaattgaaaccacacatacacacaaaaatttgtatatgaatattcatgacagcatcatttatattagccaaaaagtggaaacaagtcgaatatccatcaattaatgaacaggcaaataaaatgtggcatacccatacaatggaatattatttggcaataaaaataaattactcatagatgttacaccattgataaaccttgaaagcatgatgctaagtgaaagcaaacaagtcacaaaggaccacctgttatgagtccatttatatggaatatccagaatgggtgcatctataaagaggaaaagtaaattagtgatcgcctagggttggatggtgaagggacgggaacaggatgattgaagagtggtatgtaaggggaatagggcttctttttgggtaataaaaacgttctaaaattggttatgttgatagatgagctgtgctatgtatatattaaaagccattgaattgttcattttaaatgcgtgaattgtgtgacatgtgaagtatatctctataaagctgttaccaaaataaaagttctttcttgattagaagaataaagcctaaggatgatctttggaaacaccaaaagtgatatgaagaactgatgtgacatcaaaggttctttgttccatgccaaaattatgtaaacactggaaaaagcatgatattaaaaattccaataccaagaaaggctaaaactaagataaatcaccaagttttataaacaaagaagaaactcagtgaagagagctcaggaagtatcaaaagttgacatgggaaatcaatactggatgctgaagctgggtttggaattggagccaagctccttgaacaaatctcagagctaggattctgcttagctcacaaacacagtactaaaaagtctccacagccttaggaagctgaaagaaaactggttatttgtccagggctatgggttggcaagaccacatctgtgccctgtaccagagtaggctctgaatttacactatgctcacaatagtgtgtaggaatcccaaacagagaaaataatgcaaaacttggcctgtaactgctaccatatatggggtcccagcagaagagaccactgattgtactatagaaatgatttcttgtagggatggtttcatgcaaaacaactgccaaaacaaaataaaaacacaacagctcatagtaaaaaaaattgcaatatcagaaaatgaatcagtctgaagtagaatcagcaaataatcaagtctagaaatatagaataatctgagacattaaaaaataaatttgatatcttaaaaggtatagacttaaagctatataggcatatatatataggtatgtatacataggtatatatgtatataagtatagacttaaaggttcgtaggcagttatgaagaactaaaatgaaatttctagaaataaaattatcaatagattggacaaacaatggaccagacagctaattaagtaattagtgagtttgaagttaattataaagaaatcacccatgatggaatacgtagacctagaaatatggaaatagagctgtcgaggatagaataaaaaaaatctaaagcaggaattccagaataagagtatagaaataatgaaggagaggcaatagccaagtaggtaactgtatgtagtagagaagtgaattcccagactgaaggaacaaccaggcccacttagaaacatcacagtgaaactgtgaaatggataggaatgaaatgggaaggtaatctttaaaggtactgatgtcctgggcatagtggatcatacctgtaatcccaacactttgggaggctgaggcaggaggattgcttgaggccaggtgttcaagaacagcctggaaaacataacaagactttgtctctacaaaaaaaaaaaaaaaaagccacacatagcaagataaagtaagttaaccaagtatatatttgtatatgtttatatatataataattaaaaatgaaaaatgatataccaggtaaattagaacaaaaagaaaaaacagtggtatagtaaattaatatcagacaaaatagaatttatagttaaccattagtaaagataaagagaaatattaataaagatatcaaatatgcattatgaactaaaatgaatgtacaaagcaaaacattaacaaaataagatgaatctatccaaataggagatgttaacaccttacctcagaaattaataaattagatgaaaatatttagaaaaaatatagaagacttcaataactcactgaagctgatatgacagatgcgtgtatgactgcatgctctgaaaacgcaaatatccattttctcgagcacactaaattcagaggtaggtttttttgtggtggttataggagcagactatgggtttgactaagcttgtcttagcactgccgcttgccagctgtgttacttggttaagttactttatcttgctatggctcagatgcttcattcgtaaattactgatcatcatagtaccttgtgcgtttgtgagctttaacaagttaaaacatattaactgtttagaatagtgcctaacacatggtaaatacttgaaaaatgttagttggtattattactctagatgactgcaaaagaagaagcacaaaattccatgaaataagtttaataaaatgtggcaccaactataaaaaatagccccaacttccccatatagctggaaatttaaaaatggacttctaaataattcatgagttaatgaagcaagttaaatagctatcaaacaatatttgtaactaaatcagtgaacatagtatatataaaaacttgtggcatacagcgatcacttcaattgaagtttccaaaaatgaatgtacatatcaggaaatagatcatttggaactaaataaaagaaggttcaacccaagcagttagaggaggaatagcagagaacctctaatgaaagtgggaaggggaaaagcatacaagaagaagcacaaagtaatacaatagcaaacagaaagaatggagaaattactaacaaaatacaaaggatggatttttgaaaaggatgttaaaatagacaagcccatggcaaaatcgatcaatttaaaaagcacacattaacacatacaggcaatatgagaaataaaaaaagatatcatttcagatctagtgaagatttttaaattctgagagaagaatttgaacatgttatgctaaataacctgaaatcttagactaactgaacgattttctaaatataaattttcaatatcaacataggaagagaacatctaaatatactaatattataatttaaagcattaaattagtagtaaaaatgctgctttcttccacaaggatgcatgcagtcagttaatatttattgtagctaggtcctagcctatgcaataaagttaagaaaagtatgtagggaatggaaaataaagaacaaaatggttgcatgagtatgtacatagaaaatccaagagcacttactgacagattttagaagtaataattttgttgtatataagaatcatttaagaatatttttgtaatacagaagcaaagaaaaatattacattcaaaaaaatcaaagtagcaataatagccataacatgcctataagatatctagttattatttttgtacctttattacaaaacagaatagagatctcagaaactgaccatataaaacatcaaattaatgggatggcattaaaaatcagtgaggagaggatagattattgttgacattgaagtaataagttgtacaaatacaaagataaattgagtttgtagctgacatttaaaacaaactaaaatgcagacaaatttaaacacatagatattgaatcaaaaatagtttaaattttgtagaaaatataggggaatctatacatatatattctgccttggaatagcaagagagttctttaaaagcatacaaaaacaaacaaacaaacaaaacccaaacaaaacaaaacaaaaacaagccaaaagggagaagacagatcaatttaactacaccacaaccacttaaaagctgtagtatatcaaaataaaaagctaaaaggccagttacagatcaaaaaatgataattgtgttatatatacttgagtctttttatataacaaaacaaatgaaaataaaaagattaggttccaggcttataactccaacgaattagtaagaaatgaaaaccaattgattgagtagaataaaaactcaagaatgggaacaaggagtttataacaaggcataagaaaatggccaataaataagaaaatgttcaagcttaccagtaatcaagatcatacaagtttaaaaaaaaatcaagggcataaaattttatgtctcatcaggtaagaaaaaaaaatgaaaatatctggccgtaccaaatatgggagaagttatagggaattggaaattatcaaatactagtggtgggagaataaattggtcaaactactttagagggcagtttagcaatatctagtaatgttgaaaatttgcattctatactagtaatagtagggaaattctcatgtatgtgccatggatgttaatagctgcattgattttaatagtgaaaaattggaaacaatgtagattaccatttatatatgacatattatgtaagagttaaaataaatgcactatatcttcatgtactaacattggccaaatattgagagcatagtggtgatagaaacaaataaaagcatagtataatacactctttataaatagatacatatgagggaaaataaaaatatggatagggaaggattcacagcaacttcagtattataataatgtctgggtaggaaaattaatttttggtggtacatgatctaacagcaggagaatagctagctggtatggaatgggaaatgcatgtctgagcatggctgaaggccacagaggaaaattcacccatgaaagatttacagtgattgtgggagtcacaaaccatacaacaattttaatatgttcaccatacgaaatggattcttcattatttataagttttctcagttatatactaatattcacaggtcaagagagtgattttatttccagaaaagcaacagaacatgaatatataaaaagtatattttaaaaagcaaaaggacatgaatatataaaaatgtgcagtatttttccaatagtcacaatttaaaagccatgttttggccagtaaatgtgttatatagaatgtagtagaatatttgaactcattatgcttgcagtttccataaataaatctgccgctgtttaaaagaattggagttaatatctacaaactgggtaaaatattagcacatttttaatgagattttgtttatgcttttattgtaaaactatttgttctgtaaccattttaattagtaattgtttctttagaatggataatatgttttaatttcacaaatatatctatattgcaagtatcttagtagaggcaatcatcttctaaataatttttaccaaaatacatttcttaagaaggtatagattcttattcatataaataattatattttacagactcaccaccaatagtctattaatagcttctatagcagacttttccttaaggatgttagattaaggaataggaaggaagccaatgtggcttggataaaagtagcaaagggaagagcaacagaagacgaagtcagagagttgaggaggaggtgtccagatcattagttaaatgaaagaatgaatcagccacttttaaaatatgaatatgtagtataagattcagaaaatgaatttataatctggataggaatctaggctccatcataaacttcttatttgtaagttatttgtccttttgttccctcagtttttcagtctgcaaaaatgggactcacagtcttactggattgtttttatagttaaatgtgataacttaattctgtaataaataaataaatatgagaattaaatttgagaaataaattcctcagaacttgcattgcagagtgctggatacattttcgtgtctaacacatgttagtattccttcctttcactcttcccagttaacatattctcttcaagctataagggcagtggggaagttcaaattgctttaggaagagctataaacaaaatcaatgacccaggatttaccatgaaagaaagtggaatcttgttcacatagtaaaatagaaggacgatttgtttaggatcttcaggatgcataatggataggtttctggaggcccatgccccactcaaattgtatgtaattatctttacgtatatgcatttcatttagatttctgtctaaacttgcatcagactctcaaagtacccatctcctctgaaatattagcatgcactggctcttaaacatgaatggtacatcctttataaaacagaatgatactgaggatcatccaggctacttttcacatttggataagcgcatttgcttcactttcaaaatgtgaactgcacatacacaaaaacttcttgttcctttctctttccctctccattaagttgcaaatagcttggggaaagtgcaacagatctgatcttggtccatcatacctcaagatgagttaattccctgggaatctggggtggggtgataaagggcttctgacatggagttgacttcactttgtcaaatttagtaggggcaagcccaacttttatctattcacgtttaataaatttcaatgaaaaacctactgtgtgccacaagctgtgccaggtactcgacctgtcgtggtgaaccagagagggaagtaagcaaacaaaccagcaaggagattttaaattacaggggcaggggactgggggtgggcacaggggtgtggggatgtgtagggagaggtatatgtgccctgatggaaaccaaccctgctgcctttagggaggctgttttatcatgtggtggtctgggaaggtctgggaaggtggtgtgtgtggggtggggggtggagggacacattagactgggactgccaagaaaagagcaaggaaaaccaataacaaggcagaggcctcaggtaaatgggaaaaagtatgtcctgttcaaggaacagaaaggagtgtcaaaagacaaaattacaacaaatttaaagacctcaattggctttatttgtgaatctagaatccataaaatgtaagtgttccaatgagttgatcagagggggttagttttaacaggactggaaaaaagcagaaacaaggaacatgaagtagagggtcatttcagcgttgcttttcttgcagggcgggagtagggagacagaacagtggaaacataacttaaagcagagggaacttcattatcatgccaatggaagattgaaactggcctgtttgggaaattggttgtttggtgacagaactttggtgtgagtttttatcttttagccctttatctgttggagccaagtgcaggatcttagttcaaaacaatggacttctataatttttatttaacagaagccagtgtggcttgagcatcctgtgtgagggagacaggtaagcagtaaggttggaggggcaggcaggagtctgatcataccaatgcttataggtcaagtttgggaatttgggtttttctgtaagagaaataggagtaaatttaaaaattctgagtagaaggagtgacctgatttaagtgtttaaactatgactcccagtgatccttggaaaagggactgtaggggtcaatgtagatatagggagtccccctagatcaaaaccaccaagatatcttgcaagttctatcacttccaaatgtatatctcagatccagcctcttctttggcagtgtagggttgaagggaagtggttaattaccaagttcttggcttgaataactgggtgaatggggttattattttctttgatgaggaagactaggaaggctcagattttagtgcgtggagagtggaaaattgtttcttcctctccctcccttcctctcttccttccttccttttatccttccttccccttctttagacaggttctcactgtttgcccaggctggaaatgtagtggcaggattgtagctcactgcagccttgaacttctgggctcaagagatcctcccacctcagcctcctaagtggctgcgactacaggcatctgccaccacagatgttctctattttcaatgtatcaagttttaggtacctagtaaacatccagtaatataatagaacataggagtctaaagtgcagaggaactgtgcagccttgagatgaagattgagaatcaacaatatacaaaggctattttaaccacaggatgaataagacagagaagtaaagaagacctgggtaggcagttcgtctcacctgacacgtgttgctccaagagaaagcatagaaatgattttgtaggcacaagtgggagttgagtcaagcttgggaggatttcttttctttttttattaaggtgaactttttttagaacacatttgtttatgaatggaagtgatccagttttagggagcaaatgatgatgccaagagaagatggctcactgcaattgtgagggttaagggttgagacatgtcttctacccataggtcagatattcaacttcctttctttacctgggtaactcagtggaaaatggttgcttaaaatgcagctgccacccctgcctgcagaatcacaggcaataacaccatttggttaagaggttttataaagcttagacagactcctctaggcattaataaaagcaaagataccctcctgtctagttgtggtagtacacagaattttccctattatttgaatctctcccttgtcccttctagaataggcatagtttctctagtgagtaattatgtcaatttttaagatcctttgcgtaaagatcttcctattcatggaaaagaatgtttattttgcttttgccacagagtaaatgtaccatgcaattacaaagaacttctttatcattaagacctttgcatcaagaatctagtctcagagaactttctcaaaggactggaagaaaggtatgctaattccccaaatgccacaaaagaagaggtaattgtcttagccaagaagtctgccacctacagggcagaaggaaagaatgcacgaatcttccagtggataatatgtcactttgatgggtattccccataacaagaattaaacagcaatgtgtaacttactaacttttccctgacctaagggcttcaaagttttatcattgcttggtttaggtgatgacttagcattgttgtatatttgctcccatttccaattccttgcatcaagaagtctcccccaagtgaattagctaaaatatttcctgctttatctacatcatgggactagatattatgaatttattcagtagtctgattgacttctaaacttagttatataaaggaagatatcacgatgtaacagaactcatccccaaggctactgcagacaaaattaggagaataacaaacaaatgcaaatgaaagtcatgtagaaatggtactgtttcccctataaattctaatcactcaaactgtatgtccatatttcaactgcatctactcagatccttcagaacagattgttaaaaaaaaaatgtggcgatgttagttttgttatttgattttttaatttataagcattccctgcagatatcacagtgacagcaaatttatagagtgctaataaaaaggatgcactggatggaaatattttaagatatgatatttcttcaagtaattacttgaaccagtaaggtctgtagttgtaacattttgcatataagcctgttcttttattaattatttgagttcaggaataaaaaaaaaagacagaatttacttttggaaaaaaaacgtagatttttagtaatatatgagaagaagtacaaaaagctgatgaaagttcatgcttcttaatcattgaagccacttttctcctttaaggaaagactctccattctcacaatccagcatctggcatacagcttcacatggcaaatggcatcaggaagccaggagtgttttcctggcagcctggttgggccatcttctcctggacacctgctgtgttccagggactttatcacctctttgattgctggcagttcacttcatgatcagtgttaagtattttctccatgggaaggaagtgtgggatataaaaaatcataagagggccgggcatggtggctcacacctgtaatcccagcactttgggagaccaaggcggtttatcacttcaggtcaggagtttgagaccagccttgccaacacggtgaaacccaatatctactaaaaatacaaaaattagccaggcatgctggtacatgcctgtaatcccagctactgaggatgctgagacaggcgaattgcttgaacctgagaggcagaggttaccatgagccaagatcactctattgcactccagcctggctgggggatagaacgagactctgtctcaaaaaaaaaaaaaaaaagataaatcataagggctgccctttacaaattctggttctgtgacttcctaccgtgactttggacaagtttcctagctgttctgagacttagttttatcatctgtagaatgagattaacagtatgtatcttcagggttgctgacagaatttaaaataaaatatgcaagttagctagcacaatgtagatgatccaaaagtggtatccactcacctcttcacaaactgtagttcatggaccatgtaagtcaagaattaaggtacaactattatgagtaagaaaaaaataagaaatactctccagtttcctatgaaaggattcatatttcttaaggttatggtctacatctgtaattcaattaaaaatatatagaaaatattcttaaggtaataaaagccatctatgacaaacccacagccaacattatactgaacagggaaaaactgaaagcattccccctgagagctggaacaagacaaggatgcccactttcaccacttctattcaacatagtactggaagtcctagccagagcaatcagacaagagaaagaaataaagggcatccaaaacagtaaagagaaagtcaaaattgttgctgttcaccagtgatatgcctagaaaatatttttgatatgcactatggataatgcaaaaataggtaagttattattacccttaaggaatattcacttacaaattaattgtaatgcaaggtaggtaatggtttaagagaattccaactagctacagaagcacagtaaagacagaaattacttttggtttaacagctaaggaagacaaaataagacatagcagctaagaatgaagtaatcttaacatttgcataaatgtagatgcgtggaagagcactcctgagaaattaaatttctcaaggcatgatcccagcaccagctgcttctacatcacctgggaatttgtgagaaatgtaagattttgcgttccaccccagacctagtgagtcagaaattctgtggattcttccaatgatgtgagttttaacaagccttccaggtgattctgatgcatactaaaactatagccactagattaaaccatccaagtgaaagtaagagctgggaaagataaagccatttcaggagatggaagatagttcaatttttctggacttcatggtgtaagagaggcagtggcaaaagaaaaagctaggttgatgtaatctaaatgaaggatttccctgttacatttaagctagttttggctttattccactggcggaggggaaccatggaaaaggctgtttagggaacagggacaaaggcactgtgagagattttaaaacttgggagcaactcattttctgcccactaaaaggctcactgaaccagaaagaattacagtagacacattaaatggttttcccggttccctttctgggaagcatccacaccccacccccagttctcctaccctgatgttcacataccagtctttacagctgtgagcctccttccagctatgttttcccagttgaccacaacttccactgatgggcaagcatgggtacctgactcagccagagccaataaggatccattcctttttactgcatagtgaaaagcagattttataactgggagaaagcaaaggagagagaggaaagaggaaaagcaaataacggagaagttggagagcaagtgaagagaggagtgggagagaacaggagcacacctccaggcatatggcccctgggtcctgcccattcctgaggcccagcaccattcataggtgccttaggttccaggtactgccactgtatccttatagtaaagtcccttttttgcttaagctacttgttgctcatcaaggtgcaatgatatcgaatttaagtctatatgtatacataatcctgtgtcaaagattacttatgtagaatgggtcatgcataaaacgacttggttcaattgtatgtttttctgggtccaggaagagtcctaactgcttcataggttaagtcagaaaccaggcttcctgtctctagaaggcagcctctgcaagacttgtccattagaggctcacctattctttctatgacctggagcctcttaaagtaagtgcaaaatttaacacagcaaaataaagagaacaaagacttaaaaaaaacaaacaaaaaaaacaccttgcgacctccatcatctgttattacatgttacagatcaaacaaaacactagtaactgatgatgcagagaaaagcagatgccaaattcagcatgcactgtctccagtggtctgattctttcatcctctaaggccagtcaagtaacatcactgttaacataaaatggctgaaagaaacggaggaagcaagtactactggtattattccatctgatacatccttctttgaaaaccctggacttgtggcctatatttatgaaacattccatccatcacaaaattgttttctctgaactttgaaaataatgcggatgctagcaaagttactgtttacttctaaactgcttggagcaacactaagtcatttgaacaaaactaaattaaaaatgttaatctattatgattattatgatcaaggacaatccaaaacttaaaaatactcaaaaaggtaaaattttatccattttttataaatacatatatttaagcatacaaatatatgaaaataaatatacagaaataaatataaatatatgaaagtatataacacacacatattttgatcaaagattaattacacaggctggattttgtgaggaataagtcacacatcactagattttgcaaatacaacacttgaaaattctcttaaagaaaatactctcaatacattttaagatttctaagaaggtttattaaatgttccaatttggcacaaaagcaatttctaatctttctagttcagttctataaacctatttactgtcagctctttcttttcatttattccttttgttaggactaggataatttaattaggataaaagagaagggtaatgattaccgaataccatcctgctattgacaacctgtggcccttccagctactaactgaggaactgctactgtcttcgatttttgtgtttgtttgtttgtaatgatacattcctccaactccctagctaagcttttgtctaatgatatctaagaaaggaaaaacaacatgtcaggcgctgctgtctagctcaaagcacaatgttatggctcatgctgggcctggctgcctaggatctgggatacacagaaacaggcacatagaatggctggagcggggcactctctgggcagggagggatgactcagatggatacagtgccattggcttgagcatacacgacaggtagacatctccatccacgaatgagatcggaaccagaaacagcatcacacctatgcatatttaacaccaacccctccagccagtggagatgtgggccagactgctctgccaggcagccatcctcctcagtctcagtatctactctctctggcatggcaatacagcactcgagcaacaaatacgtactgagtactctttatacagctgtgaaaaaaccaaaagtcctgtccctatgggggttaggagagaaacaattcactaaaatggtaaatatatagtatattagctagagagtaatgtaagtgctaaggggaaaaataaagcagggtaatctggaggggaaatgtcaggcgtgggaggttaccattttagacagaaaggctggggaggaacaccctgagatgacattggagtaaaaccctgggggaatggaggaaggaatacatggagatagctggggaagaaattttctgggcagagaagaccattgcaaaggccctgaacagtcatctgggcagagaagaccattgcaaatagatgattttctaggtgttcaaaggacaacaaggaggtgtagctaaaacagtgtgggttaggatggggataacaggagatgaggtcagatagaagatccagaccaagcacatcatagaaaggctcttggctctcttactttgagatgggaacttattcgagggttttccacagatgggtggcatgatctgacttattttctaacaggattattctggctgctgagttgagaatcgacttaagtggagaaaaggtagaatcagggtgggggcagttaggagttattccagtagtccaggaggggcatgatggtgacttggaacagagggatagccctggagaggtgacaagttctcaaattctgggtacatttcgtaagtgcagccatcaggatttgccaaatatcagatgtatgatagataaagtatatacgagtcaagaaaggtttggggtctgaataactggaaaggatggagttatctaaacaaagatggggaagtgtaccccaataagcagattgggaggggaccatcaggacactagattcagatatgttcagtatgaaaagccttgtaggtgaagactttttggctgtcatggccattcatggctataagaactagggatataaatttgagaatattcagtatattgatggaatttaaagtcatgggattagatgagattagacaaaagcaacccctgacattcaggagcctgcctcgcactgttacctaagccctggtgttcccctgttgcccataaacaattgcattgaacaccaacattgggcaaggccactctgaccacaatggatcaagaaaaaatagacacagacaaaacatgaatattttttaaagaagatcaactatcttcctatttcgattattaactgttgcttctttgctagttacagttgtagctttgctctagtctgcccttctctatagataagatttattgagataatcatagaagtttcagacagcactcagtccacagtgaaacttcccttccttggactctctccaaaatcatccaaccaaatcctaaaccttgtaataatcctttctaacctcatcttactaaaactatcatggttacctatgtatgagtatgtgttctccctgttgtagtgagtaataaacccaactttctcaactacaggtgtgttccaggtgtgtttggatggaagggattgacttagaaaatacataaacaatataagagctctaaggactgggccctgaagcactccaacacataaaggacagggagatgacaaggggtcaattaaggatattgaaaagaacagccaggggcatagaaggtaaaccaggaatgtatgctgttctggaagccaagtgtagatgaaaatgaccaactgcatcaattgctttagagcggtcaaataagacaaggactgagagccggtttggcaactttattagtgaccttgacaaggacagctggatggtggaaattatgattgatgtagattcaggagaggataaggaagagaaactggaggcggcatgcatagacaactcttttaaaatatcttgatgcaaagggaagaagagaaaaagcaataactggagggtgaagtagtatcaaaagagggctgcattaagatgggagaaacagcacttttctatactgattggacaaacaatccagtagagaggggacattatggtgcaggagagaaagtactgttggggccgtgttctttttcgaatggagctgggacctattgtacaagtggaagggttggctaagttggagcatggtaaagggagaggagatgggtatgaaggtatgcagaccagatgaggtgggtgggagcaaagcttagggaagaggttccttcccttgtaattgcttctggttcttaaagaatggggatgcaagatcatcagctgacagtgaggataggagaggaaatatttgaggttcaaggtttgaagagacggaaggaaatagttgtttaggagaacgaaagtagatgggggtttagggaaataaagaatgtttgctgagcagcatgaagaactttcttaaattaagcaaacattaattcattttccatgtacttattctttcagtaaatatttacataaacatataataggaaatgtaggagatgaagctatgaactcctctgcttattaccttctctactctttaattgtgagaattcctaagattatcttctcagttcctcttttttcccttttaaaattccctcctttgagacatcattcaatcccatgctttcaggtatagtgtagagctagggtaaagtattccctatatgctttctcatcaaaactagaccaacagtccagtaaaattataatgggacaagtatttatcattttaaattttcttttctttctttctgtttttttcttttgagacagggtgatatggtttggctgtgtccccatccaaatctcatcttgaattcccatgtgttgtgggagtgacctggtgggaggtaactgaatcataggggcaggttgttcctatgctgatctcataataatgaagaagtctcatgagatctgatggttttataagggggagtttccctgcacaagttctctctctgtgcctgcttccatctatgtaagatgtgacttactcctccttgccttccaccatgattgtgaggctttcccagccatatgtaactgtaagtccattaaacctctttcttttgtaaattgcccagtcttgggtatgtctttatcagcagtgtgaaaacagactaatacacagagttttgttctgttgcccaggctggagtacagtggtgcaatcttgattcatggcagcctcgacctcctgggctcaagtgatcctcctacctcagcttcccatatagctgggactacaggcatgcaccaccatgcccagataattttgtatttttttgtagagattgagtttcgccatgttgcccaggctggtctcgaatttctggccacaagtgatctgcccccttggcctccaaaagtgctgggattacaggtgtgagccatcatgcccagcctgtcattttaaattttctagcagccacattaataaaagtaaaaagacacaaggtaaaactaattttaatatattttatttaacccaactatctgaaatattatttcaagaaataagataaacaatattgacatattttacattttttggtgctaagtgttcaaaattcagtgtgtactttttcttagagcacttctcaattcaaaccagccacagttcaataacacaatagtcgtatgtggtcttaatgaacagtacagctctagactctcattttccaatgaccactggacacttctgcctcaacattccacaagaacaactgaaaattttctaagccaaattaatcctgtctgctcagatctgttcctcttcccgtctttattacatttctattttattttctcctctctctcattttccattgagaaaagggtcagaacaagtgctcttggaagtctcctttctgttcctatcatcacactagttctcaccatgataatttctaccttgacaattgcaataacctcctaactggtctctccatttgtaatctcctctccattttatgctttgcttcaggagaaatccctcttgatctcaggtttcatgatgtcactttaagtcttgctggaaggacattggtgcagattttagttcccaaagtggatccaccaatatatctatcccacattttctcctcatgcaacatacagttgatacttgtctacgtggagatgaggtccatattctctccccttgaatctgggaaggcttgtgatcaaaacagatgcaaagttgcctaacttctgagttaggtcataaaagcagtatggctttcacctgattctctctcttgggctcatgtcttgggatccctgagccaaaatgcaaaaagctcagctattctgaagctaccatgtaggagaaatcatgtggagagaccacctggagacaagagatgtctagggatccccaactctaatactatttgtttggtacttcagatgacaccagcccctacacctcaaggggcatcagtggatgctgagtggaacagggatgatctatctactttacatcctacccagattgcagggtcatacgcaaaataaattttgctgttgctcattcagtttggggcattttgttacacagcattagatatctagaacacttgtcacttctcactttttatctttgtatatcatccacctgcctaatcctaggaggttcattatgtactcaaggtgataagaataagtctttggcacacacatacaaaaactggaaaaagctagtgttgttctataagaacaaattgattaacagttgccttttacctcattctagtctcttacttgtgttgcatagaaaatgaggcttgggatatattagacaaagtaaggatagcttctgtgaatgtcaactgaactgtgaaagatactatcaattttatattatttaccttaacagcacatccaaagtaaactcattttaaaatataaagaatgctgcaaactaattgtgtagagataattttaaaaataggcataagtcatgcctttcttatgattatatttaataaatggagaatatggtttcttgcattttatactgtggtgcaataggaaaaataccagggtaggaattgtgtttttgatgtgtgttctggccgtggtccacactgggtaacatgagagagtgaactcaataattgataaagctctccctctcctttagaactaaactgctatagtcttttgtttctactctcttttattttaaccttctttcttccttctctcttccttctttttttttgctttataacatatttgtggatttttatattttttgttaataaatagttgggaagtcaaatgtcatggtattaatgtccacaaagctgaatctcttattgaattttttgaatatcagctatgtacaaatgggacatattattcaactccagggttacaaagttctgtgcttaccagaaaactcattacagaaaattttgttcttttcttagaatagcatagccctttgggctatatctttcagtaaccaaagtttccctcctataatgttgcttagacaacgttctaaaggtaagataccattacacttaagttcacactgtgtgattattttgtggaggaaatgattttgtcacctcaggtaggaatttgcagtggatgagagggaatcatcttctcctacatttggttttattgataaatgcttttgcatcttatgtagtcacatttttgagtgaaggagtttaatttttagtttgagttttaacagtagatttccaaagtttccttgacaaactcttaaatctagaatgtcatattccacttctgaatttgctgcatttcctggctccacatttagtatctatatgacttgtgcaacttaactgatcttactgagccccaaatatgtgtacaatatttggaatttttatgaaagatatattttatactattatatatattttatattgctggaaatataggagttaattatttccattttttataggaagaatagagtcagtgatgataatctaccctccccaaactccatctagccccactcccctgcacattttttccccatctccttctctacatcactctaagggattcaccctgaccctctctcccacacataccttccctgacatgatatctagacttcaaaccctaggacaggaactcatccttacaaaaagatatttgttccttgttttaatggaatttccttctctccatgatcttatgtaagtaatataatttttgttgtgtatattatttttgaatatataagttcccaacaaagatacaaatatttatacattcacaagaagtggttctttaaatatatgcttttttgacttgactttgccttgctattggtatgagattgtacaaatgtgttttaatatttttctttaagctttatttgttttcttatcaggctatggtgtgtaaaggaagtttagtaatgaatgattcatttctgtgcagattgtgagatggaaaaatgctgataagtatcctttatttttactcctttgggataaaaaaaaggataagactaagttggcctaggttgagctaaggcatctagcattgaaagggaagatggaagagctgctcatagaagcatatgtaacctcctgagccttgtccaataccctctcttaaactgctgaatatccttgtctggaagggatttcgtgaactatttttctccatgagcacaaatatgtcactagtaataaagttgcaggaataaaatagtcatagtcaccagatataaggcagcccttaaagtttaatgaagtgatctgattacattaaagtcaattctcagttaatggaagactgaatattcatctaaccaacctccatgcctctgttgctgagtagcccatcactacttcttgctaatggcccagagggcaagaggggcaaggtaaggtagagatggtgtgggcttggagtcagggcaattagggtgcaaatcctggatcccacttactatttgtgataggcaagggctaaggactaaattccgccctctctcacaaataagttcatatgttggagccctaacctccaatgtgactatttggagatagagcttttaggagcttattaaggttaaatgacagtataagagtgaagtcctaatccaatggtattggtggctttataagaagaagagtaagagagatcattttctctatctctccatgcatgtgcagaggaaatgccatgtgagcacacagcaagaaggcagccatttgcaaaccagaaagagagctctccccagaacctgaccatggtggcatcctgatgttggacttcaagcctccaaaactgttagagaatacactgctgttctttagccactcaatctatagtgttttattatggcagcctgagcaaacagacagcaagtgactaaaccctttgtctctttgttacaatagaaataataatacctacttcacaagatcattgtgaggactaaaagagatcatgtacataaggacttggacatttaaagaaaagaagaaaagtttcagcaaaaatattgtccatatttatatacgattgcaaaacaagtttggttacatacccctcaccccatggctcagacactttcagaatgcttgttaaaaatacagattcttggacccacattagacctaaagaattaggatctctctgaaagggctaaataatttggattttaacaaattccagatgctcttttgtacactaaaatttaggggcactgccccaaaggaatggtacaataatcagtgtctcaaaatgttgttctataaatgcttaatgccaggaactcagattaaagcaatttatgtcagtagattccaattgacaagcagaagattaacagaagttcttatctgaaagctactatctgagtctgcttggctattgttaatcagcacattaattctttagatgtactataaaggacagtgagtgagtgctggttgtaaaattaattaagataatgtaataacatccctgtgcaattttataaattgccaccctatttaaatatcactttctgatcaataatagatgagaacacagtgtgttcaggaagaaaaaagaactgaaagaagttactgctcatgattctttatctgtgctgtcttgaataaaaaagtagcaggtgaagttgtctttctgtaggcacatgtaacagctgagcagaaggaaaacagcagcgctgttcctccctggctcacagaaatattgactccttttttagtgatactaagtctcatctaaatgattaaatctttaaaaagaatgccaaatacccagcaaatggtaattacaatgcctaatccacctcctcacttcttcgtgcaagacaatatttactctgggttatgtgtttgccagaacaatcacagcccagcttcagctggtgggtgttcagctgtatctttgccatgcatttttgcaggatgctatgaagacccaactgaaactaagaagcttcgtcaatggttaaaaatgtctcactagaaatgtatttgcatttcacttggatctcaattggatttctttttttattccaaataattttagctctcttctctcttccttcctttgctatgtgcctaatctcacaagccatatgtgataatgagtttttttttctactttatagtcccctttagtttatataatggatttagtccttattgagcttctaccatgtactaggcacactgctagttactgaagtccagatctgccaaaactgacatgaaatgaaacaggaagctgaaatcccaacacttcatagagcatatttgtcatgaccctcacaggattatgtcaatcattatgtgttatggatagttatcttctttcaggaaagttatcttctttcatttgtaagatattttgtaagtctcattatcatttttatcatgtttgaacaattgtttgcaaattaaatgctttaatttttttccttccaattcccctcatttttcacaattgtattagttccctattgctgctgtaaaaaattaccacaaatttagtgtcttaaaagaacacaggcgtattgtcttacagttccggagtttagaggtttgaaatgggtctctctggatgaaaatcaaggtgtcagcaggactgcattcttttctgaaggctctagggagaatctgttttcttgtccttttcagcttctagaagctgcttgcattcattggcttatggacaccttctatcttcaaagccagcaatgaccaatggagtctttctgattatgcctgctctctggtctggctcttctgcctccctcttcctcattaaaggagctttgtgatcatattgggccttctgagataatccagggtaatcttcttattttaaatccagctgatcagccatcttaatcccatctccaaccttaattctcctatgcaacataatacattcacacgttcaagggagaaagacatgaacatctttggtggcaggcattagtctgcctatcacaaatatgtagtgattctttcctgtttcagaagttaaatggtatttagcaagtctttttcttcttactatatagttttgggtgggagttcctcttctcttcagcagtttgtaacttagaaatcacttgctttcagggtcagctaaagaaactataaagactcatctggtttgcagtatcctattgcctcttaaacatccctttctggtatccttctgctcaggaccatcctgttgtcctcctggatctacagctggctgtgcctttgtatttttctcttgctatttgacctttgttctctttagtgagtattctcttctctattccattttattgtaggcagagaaaccatatttaaattttttcttcaaattattgtgttctttctctggcaaaaacgttaaatggtttaacaatttattgatcatatctaactttttctgccaatgtaggtgtgtgagcttctgttttattccacactgtcatatttattcctctcaacaacatttgtttgaaaataaaggctggggccggtcacggtggctcacgcctgtaatcccagcattttaggaggccgaggcgggcagataacgaggtcaggagatcgagaccatcctggctatcacggtgaaaccccatctccactaaaaatatatttaaaaaaaaatagccaggcttggtgggggcgcctgtagtctcagctactcaggaggctgagtcaggaggatggggtgaatccgggaggcggagcttgcagtgagcggagattgcaccactgcactccagtctgggtgatagagcgagagtccatctcaaaaaaaaaaaaataataatccaataaataaaaataaaatacaggccagacttcattcagatttcttttatttttacctaatgcatgttcattttctgtcttgggatctatgttacatttagtcagtaaatgcagtggaagtgacattctgggacttgtgatgctaagtcagaagacttataccttctatccaagactctatgaaaagataccccactctctgaggccaccatatcagaggggctagcataggtgctatggtcaattgtcctgctgagcccattcttctagccattaccaccaagactgcagaaatgtaggtaaagctgacttgagctctctggaggagccaaaccaccagcagaatacctccaagtgacttctgttaatgccatatggcacagataatttctcaggcaggcccttcctgaattcttgacccacacatttatagcagatgataagatggttgttgttattataagccacaaaatttgggggttattttgttatatagcaagacatgacaagcattgctgaatggctttctggtcctgatagtgaatcatgcaggagaagttaaggctcattctatgtcaattttaaagctggcatactgccaatgcatgcattattctagtacattaaataaaggacttcatttttaggctctgtcagagcctttaatctttatatacatgtctatttgcacaaaaatgaaatatatcttctttgttacattttcagatcttcctctgataggggcaagagtaatctaacaaacattgtttataaaaacaagctctaacctcttttgtgacatgaaattggtgtataatttctaccgttaaaatgaaagaaaattattaaattgataggaaattatctttctttcgaaagtaagtattcccttttatttatattagaaacttatacaaagttcattttattttcttggtgtaaatatattcattagcaagtcatgctatggtgtggaatttgggaaagtttgcacaataaaaaaatacatagtcaacaattaacttttaaatgaaaagtccaaagacataagtattgatataacattagtgtctgcatatctttataagccacgtggttatgataacaatataatgaatgagaaaaaaactatgcttgaaagtagcaataaattcttttccaataaaagatgaaaatactgtatcatcaaagtgttaacaaattttagagtggatactatgaaagtcagttatgaaatactgtaatacaaaaggaaggataaatagtagtatccagttagcttttaaataaaaaggtaatagagctaaacctaattaattatgataacttgattcatgaatgacctgcagtttccctttctattatggaaacaaaaatatttgcttggaaatttggataatttaagactgcagagaaatgtttagccaatttcaggttaagggaaactgttttcaagatcagatgcaatttgcatggaaataacattttaattacctatcaggcttgaataccatcaaaactgatcccagatggatacctgatggattaatatagtttgatttattatatatggtggtgaaaaaacaactaaaattgcattaaaaaaatttcacccatacagatgttttcatttatcagacttagttaagcagttagtatctctagaaagctccatattgggctgattgatgtaagaacttgaagaataagtatgtacattcagcaaagggatgtctggatatggagtggttggttcatgagaaagtgatcttgtgaataattcaattaagcactcttgagctccccagtaaggttgtctgatatcaagcaccacttcaggtgagccgagagttttgggaacagagtcaaaactctgttcagtttggctaagaactcccttaaccaaactgaaatggacaaaccaaaatgcacaaagtgtgttttaagcccaatttcttttcccagtggctctcttctattcccttaccaggtatctccttcctctgttattcccaggtcatcgttttctcgtctcaaatttgtaattctcagtatcagattttctcagctgatgaaaaacttggtcctaaatgtgaatgtattcaatgttttacattctttagatgtcttgcatcttcaggaagagctgactattttaatatctggatctttgagctagagacccctgagtttgagtctgagtgattccatttacccaaagcactgcttctcaatattcatgtgcatataaatcacttggatatcttattaaaatccagatcctaattcattagatcagggacttgagcctgagattctgcatttcagacaagctctcaggtgatgttgtagctgctattccatggaccatgttttgcttagcagaagcctagaacatcttacctgcctctgttttctatcaactgaatataataatgcccctactttctacagttgatgcgggtgttacatgtgtgccttatgtaaagtgcctggtatagttcccggccaaaaatcatgcagtgtatggtggtagtggtggtagcagcaagtagtgtggagataataagagttttaataatatattgggaaatttcaggctgaagggcttgcaagtaatttgtaggtataggaacttactcagataccaaatgccgttcttcagaagcagccattcagtcacctgcacctagggctttccccgatgggcaaagcgtacacctgaatagttccttagttgtcctccaataatttaagactacaaaggcttctgagagtccatggtaatcttttaggttttgtggtctagttgcttatatgatgtgagccgtgagttaacattttctttcacagcctgacttagatgttttaaatggcaaattcaggagagaacaatgtatgagtctttaattttattttgtttgttagtaactacagatctggaataatattcactgagtgtttcagaaagcagagaattaaaaggcaacattacagtgcttcttagcattaataaagtagtatgtgggatatagaagaaaagcataattttcacctcacctttacctctaggggccttcaagaacttgaaataaaacactttccccttgataaagaatagtaggtggggaaggttatgaatcacttctttaatgtctttggttgcttacattactctttaattccaggaaactctgcatataagtgcaaaaaccccagagtttcagtacctcagtgttgaataagcagagcagagaaacaaaagaaggaaggtgatattaccagtacttggctatgtcactggagtcttactgcccatgttttattggctgatgtttcagggaaacactttttttcttgagtcttttttttcccccaagatgctatttctaaaaggtcagttatttgtcatgtaactattactgcatattaaaatgcacaatgcatcaaattagaataagctaaaaatactctagcagttcatgcagtacatattttaatgatattatttttaagattagtgtgtttaagggcacaggtagtatttacaatggagtatctatcaagattttcagacttgaggcaatggttatctttcataatccatttgaaataggcttcacagtctctttaactttaagaggatatgttttccttctcagattttttaagggaagcactacacgtctttgattttctgcagtactgcttgaaagatgaagatgtcaagatggatgacagctaatgaactggatgctcaatagttcatcaccttggtttttcctgaaaccatttcttgtccttgcctggtaaattgaatcacttgactttgttgcaatacctgacaggagtcaaatccctaaaatatccaggcagaagtaaattcttttagcatcacaaatcttctgctgtccaggcccgttaggccagtgggttaaggtgaaaaaagatgagaccacagtcatgttcatctggcacttgttggctcctttcacttagataaaaagtgctctagacatagatctcctcaccttgtcattggaagagggaatgaagtgagaattgcgtgtatcaacatgaatgaatttccactcttggaaaaataacttagacagtaagtccactcatgaatggccatttgtatcatcttggcttttaaagtatatttacagttttcttgtttattcatacagttgtcaaggcatatttgcatataaagtggcatgtaccctacatcttttctaaattgctaaaatagtccatataaacagaacaactaaataataccagttgattcctttttatgtaacatggtagcataaactttattaaaggaaatagtcttaacgaagattttgatatacctgatgtggcatcaacttcagttgtaaattacaaggaatcattgttattcattgtctataatattccttaaacaccaagctttattagtactaaatgtgaggcctttctggatatgcctatgccgactaaatgaagactataatgatcaatttaaaagttctttggttcataatcttgatgtaagaaaaaaaaataatgtcttaaatctgagtggtgctttccaatttgcaaaagtgaatatattcctattatgttaaaatatataaaattattagattaatgcccatatttatagataagaaaataaagctcagagaaattggatgacttacctaagataatataattgtcagaactgggatttcattaatttaatattatttgtttagtttgtactacgtgctagttaccatgtataagacttcagaaatcttatggtctaatgagggaaagagtaattagatgaataattacacaaatgtataatcatctgtgttgataaatgtttcaaaggaagaatagagcatactctgaaagaaaatagagcacctgattcagaatgtggggcaggcaatgactgaatttaaggagtgacatgcagtctgagacctgaaagatgagcaggagacagcaggtgagtacgaggcaggggaggagccagagagtgctagataagtaggatgaagcttgctgaactggagagattgaagggaggccagtgtgaatgaggaggagagaataggtgatgagactgaaaagagaggcagggggcagctcagcagaatattgtgggctatgttatggaatttgaatttcttttaagtgacacagaaggtaggagaatggcatgatccaccttgaaccaggtattcagctgcaagttcagtggctatcaccaacatacatcatcattcttctggtggtgctcccaggaaatttttgttttctttatttatttgttgaatgtttaaatacaccattttcttatatacaatgagtaaatgagtatttgatctgttggctgccataactgatgagtcttgcaattttttttaaccttcgagaggacttaattttggccaagaaattaatataaggttctagaaaaactgtatttcattctctgtgagcttcagtaatgtgaaattcatcttatattttgagattttttttccttatgttaaacaagtggttgcatgatgcttttgatcaaaatggaatgaactgaccaaagaaggaattttttaaaaatatgggatgatacccttgactgattgtcagctttttctcttacttccattctcattcatcagccttagcagcctatatctagatgttgaacaagtattctgcccttgaagatggcctgacccttttagagtttctgtgtgtattttaaaggagaaaaatgtactcactttgaagttgtttgcttgaaaacaacctacacttctgtcctttgaattaattttctaaagtttttgagagacaggacatagagatgggattatccacataattttagttttcctgagggaatcaatttgtgtgccaaatggcattctgaggctggtacttaccaatcacctgaaaccaaaatccataataaatcttaacctttgaaaaaccttatggctttaaagaaattaaatggattttaaagatgaaagtattcaatttaatttcaacaatagttaatcatttatcactacaaacttttttttaatgcttatcaaactgctctacaatgtgccagtgatgaccagttcctaggcacttggaacttggctgacagatttttattatatttcctgagtcccatctttactgaggcatatttcaccggaatcattgacacaggcaatttcagttggtatcaagaaggtcctcatctttaaagaagagtggcctgtaggaattatgcattattttctacttgcttattcttttagtaaaacatagcttgcataaatccagtatggaaatagcttaataacaaacagtgctatgaagacattcatttttattttacttgaaacatcagtagtttcatgtatttgtatttaaaggacaacttgaatttttgtagggaaatacgctacatggtaaaagtaattttaattctcagtgttataattctgttttatttttcttttcttttctttttttttttattttttttttgagatagagttttactctgtcacccaggctggagtgcagtggtgcaagcatggctcactgaagcctcaacctcctgggctcaagcaatcctcccacctcagcctcccaaatagctgggaatacaggcacacaccaccacacctggctaattttttagttatttttcagagaccgggtctcaaactcctaagctcaagcaatcctctcagcttggcctcccaacgtgctgggattacagtgtgagccccaacccagcctataatgctgtttcttttgctgcttcctttttaagcttataaacaataatcgtttttaaaataatcattatatgtttgttgcaaaacactttgaagctgttgaagtttgtgatttcagtatttaaaaagtaagccccagaagttaaatctattaaagccttgtcaattcagggtttttaatctgactacactgcattatctttaggacaactgaaaaatcagttctcctgatgacttttttctgaatgttattgttttgttagttgaaaccatttacaaccatacattttccttcatgtttatcacagaagacaaaaggaactgataaatggaaaaacactacatggacttcaatataatcctcataggattgttattgttattattactattattgtttatttcaaaagacttttccttgttatcatattgtaagggagaggccctctttctcagggtgagctctcattggccagagtgactccattaggatatgcacaattgaattcccatgtattgtttccccttaaaatctatcttaaaatcttatttttagattggatatgaggattctagccaggtgttttccttttgcctctctgtcaaagatagttttctaaaggccatggcaatgggggagaggatgggaattggacactgagtacatctatattacctagcaccatttggttgacatttatgtgggagcacctctgttggcacctcctggttctggcttttaccatccgtaggacagtctgatctctgaatacacttctttcagtctttgaggcacagcacaggcactttgcaagcaatcccttctgcttgaagctaagccaggacagaatttctcacaatgtggccagtggacccttacatcagaatttcctggactgcttttgaaagtgttttctgtccgcctcccagatggaatgaatcagaatcacaaatgttgaaggattagtaatctgcatttttactaaatctccccaagtggttcttaggcaccctaaaggttgatgaccattgttatgtactgaatgtttatgtcctccctgatcccaaatttgtttgttgaagccataatcctcaatgtgataggattagcaggcaaggtctttgggaggtttaggtttagctgaagtcatgaaggtggggctccatgatgggattagtgtgcttataagacgagaaagagacacacgggcttcctctctgtctctcatgtgataaagcaagaaggcagccatctgcaagctagaaagagcagatcaggttagagcctgaccatactggcaccctgattttggacttcccagcctccagaactgtgagaattatatgtctgttatttaagccatctgatctatggcattttggtatagcagactgaacaaactaagataactagtatcctaggcaaaactacctgtatctggacatagctggagttaactttattcttgagggtgggaataaagacctggggtgcaaagaatgattactcagatgataagttctcgcaaatagttgtctaaatttttctactgctgtgactgttgccttttatcagctatctttgtaccgcctcttccttaccctttgagtatctctttccaccagctgcatttggtgcagaaaagttttcaaagcaccctcaggtgttggatttaaacttgtaagtgtcttcattcctcatttgcccttggctagccaagagactgattgttcaagactccttatgtttctgcagggttaactaaatttgctttaccattaaatttgagaataccatgtgacctcccagtacacattaaaattgacaacatccctttagtcttcaacataaaatcatgtcattatttttgagattccgcaaaattcatgaactgtcattgaattttctgaaattaaaacagcatgttaacaaatggcagtaaatgtgatttatggtgtaatacagctattcaacatatgctgtagcttttaattcttggttattactattagccagggaataactgcaaaatgctttagaaaaataaactaatagaagaatgttttatgtaaaataaaagtaccaaaagtgcaggtttctacattctgttgagaaggatagtcatgtggtttagcaaaatgaaagcctgcagctactctctcatccctttttgtaacagtagttttatactgaatctcttcttagtactatgactatgtttgatgacataatgtgtaagtctaggttaaacaatttttaaaaagtaggcaaacatattaattgtagtatagaaaaaagttgctattttaactcaactttatagtgttttattatgtatattggggtgtttttttgttggcttcatctgaatagagagtgagtttagatacagaatatatagataggtttaagtgtggcttaaatgaattcaaagaaaaggcatttacaatgagttgttaagacaagtaagacgatgtttgagtgcacattcctagctttataaaattgatatcataaaaccatcatttcttccagtatgtactattgtcattctagatcacaggcctgagtagataagggatctagtccactatggcacttctttcttttctttctttatcttttctttttcttttttttttttttggaagatggcactatgttgcgtactaactcttggacaatgatctgagttctagtcatgattctgtccccaagcttgaggcacactgagcttttggcacatagtaggtacacaataaatacttgaagatacatttttgcagttatataagtctgcacttatttattgatatggctttcacacttgaaaatgaaaatagaggatatattctaccaaactttcagagatttaaactcttaaaatgaaacagaaaacaagcttaacagctcaaatgtgtaacattcaagaaactaatttacttatagacatgttatttgcctataagagtttcagtttcagaggagccaagatggccgaataggaacagctccggtctacagctcccagtgtgagccatgcagaagacaggtgatttctgcatttccatctgaggtaccgggttcatctcactagggagtgccagacagtgggtgcagcgcactgtgcaccagctgaagcagggcaaggcattgcctcactcaggaagcacaaggagtcagggacttccctttcctggtcaaggaaaggggtgacagacggcacctggaaaactgggccactcccacccaaatactggacttttccgatgggcttaggaaatggcataccaggagattatatcccacacatggctcagagtgtcctacgcccacggagtctctctcattgctagcacagcaatctgaggtcaaactgcaaggtggcgaggctgggggaggggcgcccgccattgcccaggcttgcttaggtaaacaaagcagccgggaagctcgaactgggtggagcccaccacagctcaaggaggcctgcctgcctctgtaggctccacctctgggggcagggcacagacaaacaaaaagacagctgtaacctctgcagacttaaatgtccctgtctgacagctttgagagcagtggttctcccagcactcagctggagatctgagaaagggcagactgccttctcaagtgggtccctgacccctgacccccaagcagcctaactgggaggcaccccccagtaggggcagactgacacctcacacggccgggtactcctctgagacaaaacttccaggggaacgatcagacagcagcattcgtggatcacgaaaatccgcggttctgcagccaccgctgctgatacccaggcaaacagggtctggagtggacctctagcaaactccaatagacctgcagctgagggtcctgtctgttagaaggaaagctaacaaacagaaaggacatccacaccaaaaacccatctgtacatcaccatcatcaaagaccaaaagtagataaaaccacaaagatggggaaaaaacagagcagaaaaactggaaactctaaaaagcagagcacctctcctcctccaaaggaacgcagttcctcaccagcaacagaacaaagctggacggagaatgactttgacgagttgagagaagaaggcttcagacgatcaaactactccgagctacaggaggaaattcaaaccaaaggcaaagaagttgaaaactttgaaaaaaattaagacgaatgcataactagaataaccaatacagagaagtgcttaaaggagctgatggagctgaaagccaaggctcgagaactatgtgaagaatgcagacgcctcaggagccgatgagatcaactggaagacagggtattagtgatggaagatgaaatgaatgaaatgaagcgagaagggaagtttagagaaaaaataataaaaagaaatgaacaaagcctccacgaaatatgggactatgtgaaaagaccaaatctgcgtctgattggtggacctgaaagtgacagggagaatggaaccaagttggaaaacactctgcaggatattatccaggagaacatccccaatctagcaaggcaggccaacattcagattcaggaaatacagagaatgccacaaagatactcctcgagaagagcaactccaagacacataattgtcagattcaccaaagttgaaatgaaggaaaaaatgttaagggcagccagagagaaagctcgggttaccctcaaagggaagcccatcagactaacagctgatctctcggcagaaactctacaagccagaagagagtgggggccaatattcaacattcttaaagaaaagaattttcaacccagaatttcatattcagccaaactaagcttcataagtgaaggagaaataaaatacttcacagacaagcaaatgctgagagattttgtcaccaccaggcctgccctaaaagagctcctgaaggaagcagtaaacatggaaaggcacaaccggtaccagccgctgcaaaatcatgccaaaatataaagaccatcgagactaggaagaaactacatcaactaatgagcaaaataaccagctaacatcataatgacaggatcaaattcacatataacaatattaactttaaatgtaactggactaaatgctccaattaaaagacacagactggcaaattggataaagagtcaagacccatcagtgtgctgtattcaggaaacccatctcatgtgcagtgacacacataggctcaaaataaaaggatggaggaagatctaccaagcaaatggaaaacaaaaaaaggcaggggttgcaatcctagtctctgataaaacagactttaaaccaacaaagatcaaaagagacaaagaaggccattacataatggtaaagggatcaattcaacaagaagagctaactatcctaaatatatatgcacccaatacaggagcacccagattcataaagcaagtcctgagtgacctacaaagagacttagactcccacacaataataatgggagactttaacaccccactgtcaacattagacagatcaacgagacagaaagttaacaaggatacccaggaattgaactcagctctgcaccaagcagacctaatagacatctacagaactctccaccccaaatcaacagaatatacatttttttcagcatcacaccacacctattccaaaattgaccgcatagttggaagtaaagctctcctcagcaaatgtaaaagaacagaaattataacaaactatctctcagaccacagtgcgatcatactagaactcaggattaagaaactcactcaaaacctctcaactacatggaaactgaacaacctgctccttaatgactactgggtacataacgaaatgaaggcagaaataaagatgttctttgaaaccaacgagaacaaagacacaacataccagaatctctgggacacattcacagcagtgtgtagagggaaatttatagcactaaatgcccacaagagaaagcactaaaagcccaaaattgacaccctaacatcacaattaaaagaactagagaagcaagagcaaacacattcaaaagctagcagaaggcaagaaataactgaaatcagagcagaactgaagagacacaaaaaacccttcaaaaaattaatgaatccaggagctggttttttgaaaggatcaacaaaattgatagactgctagcaagactaataaagaaaaaaagaagaatcaaatagatgcaataaaaaatgataaaggggatatcaccaccaatccctcagaaatacaaactaccatcagagaatactacaaacacctctacataaataaactagaaaatctagaagaaatggataaattcctcgacagatacaccctccgaagactaaaccaggaagaagttgaatctctgaatagaccaataacaggatctgaaattgtggcaataatcaatagcttaccaaccaaaaagagtccaggaccagatggattcacagccgaattctaccagaggtacaaggaggaactggtaccattctttctgaaactattctaatcaatagaaaaagagggaatcctccctaactcattttatgaggccagcatcatcctgataccaaagccgggcagagacacaaccaaaaaagagaattttagaccaatatccttgatgaacattgatgcaaaaatcctcaataaaatactggcaaaacgaatccagcagcacatcaaaaagcttatccaccatgatcaagtgggattcatccctgggatgcaaggctggttcaatatacgcaaatcaacaaatgtaatccagcatataaacagaaccaaaaacaaaaaccacatgattatctcaatagatgcagaaaaggcctttgacaaaattcaacaacccttcatgctaaaaattctcaataaattaggtattgatgggatgtatctcaaaataataagagctatctatgacaaacccatagccaatatcatactgaatgggcaaaaactggaagaattccctttgaaaactggcacaagacagggatgccctctctcaccactccttttcaacatagtgttggaagttctggccagggcaattaggcatgagaaggaaataaagggtattcaattaggaaaagaagtcaaattgtctctgtttgcagatgacatgattatatatctagaaaaccccattgtctcagcccaaaatctccttaagctgataagcaacttcagcaaagtctcaggatacaaaatcaaagtacaaaaatcacaagcattcttatacaccaataacagaccaatagagagccaaatcatgagtgaactcccattcacaattgcttcaaagagaataaaatacttaggaatccaatttacaagggacgtgaaggacctcttcaaggagaactacaaaccactgctcagtgaaataaaagaggatacagacaaatggaagaacattccatcctcatggatgggaagaaaatatcatgaaaatggccatactgcccaaggtaatttacagattcaatgccatccccatcaagctaccaatgactttcttcacagaattggaaaaaactactttaaagttcatatggaaccaaaaaagagcccacatcaccaagtcaatcctaagccaaaagaacaaagctgaaggcatcacgctacctgacttcaaactatactacaaggctacagtaaccaaaacagcatggtactgctaccaaaacagagatatagatcaatggaacagaacagagccctcagaaataatgccacatatctacaactatctgatctttgatgaacctgagaaaaacaagcaatgggggaaaggattccctatttaataaacggtgctgggaaaactggttagccatatggagaaagctgaaactggatcccttccttacaccttatgcaaaaattaattcaattaatacaaaaattaaacattagacctaaaaccataaaaaccctagaagaaaacctaggcattaccattcaggacataggcatgggcaaggacttcatgtccaaaacaccaaaagcaatggcaacaaaagccaaaattgacaaatgagatctaattaaactaaagagctactgcacagcaaaagaaactaccatcagagtgaacaggcaacctacaaaatgggagaaaattttcgcaacctactcatctgacaaagggctaatatccagaatctacaatgaactcaaacaaatttacaagaaaaaaacaaccccatcaaaaattgggcgaaggacatgaacagacacttctcaaaagaagacatttatgcagccaaaagacacatgaaaaaatgctcatcatcactggccatcagagaaacgcaaatcaaaaccacaatgagataccatctcacaccagttagaatggcaatcattaaaaagtcaggaaacaacaggtgctggagaggatgtggagaaataggaaacttttacactgttgttgggactgtaaactagttcaaccattgtggaagtcagtgtggcgattcctcagggatctagaactagaaataccatttgacccagccatcccattactgggtaaatacccaaaggactataaatcatgctactataaagacacatgcacacgtatgtttattgtggcactattcacaatagcaaagacttggaaccaacccaaatgtccaacaatgatagactggattaagaaaatgtggcacatatacacaatggaacactatgcagccataaaaaatgatgagttcatgtcctttgtagggacatggatgaaattggaaatcatcattctcagtaaactatcgcaaggacaaaaaactaaacactgcatgttctcattcatagatgggaattgaacaatgagaacacatggacacaggaaggggaacatcacactctggggactgttgtggggtggggggaggtgggagggatagcattaggagatatacctaatgctaaatgacgagttaatgggtgcagcacaccagcatggcacatgtatacatatgtaactaacctgcacattgtgcacctgtaccctaaaacttaaagtataataataataaaaaaaagtttcagtttcctttttttaaccaatgtttaggtttttcatattgtaagttgtcaattgaagttacaactttttttcttggtaggttatcttattttacccagtcctttaacactattaagtaccattcctaaagcatagccttttgcaatattctgaggctattcatggtggaaactctggacttgaattgagaaatcttggtaatctgccgcttattagcttttgaccctgagcaagtcatttaatgtctctacaccttagatttcctcattgttagttaggtataacaatagtaataaggaaaataacactcattgagtttttgtgcattttaaagaagtatatgtttggggccgggcatagtggctcatgcctgtaatcccagcactttgggaggccaaggtgggcagatcacaaggtcaggagattgagaccatcctggctagcatggtgaaaccctgtctctactaaaaatacaacaaattagccaggcatggtggtgtgcatttttagtcccagctactcaggaggctgggcaggagaatcatttgaacccaggaggcggaggttgcagtgagccgaggtcaccccactgcactccagcctgggcaacagaatgggactgtgtctcgaaaaaaacaacaaaaaaagtacatgtttggatactcactttgtaaacgctgatgcagcaacagacaccaaacattatcccaagtggccttcccaaattttctgttttcaaactactatcctgaggaagagaggctctttgagagagttttggaatattgaggttttcatgaccaatggtcattcagcctcctttccttccttctttaattttaccacatatgagttagggaggaaagagccaatataatgggactgctaacagttcatgaaagccaaaagattccaaaaaatttattagtcactaaccaagaaggtgaagaaaataatttttaaaatcttatattcctatttttgcttaaaaagatacttccattggtatctcaagctgtatttcctgaagaatcatatacttttgggatgggtgccattagtggtcatgactgtgacctgacaaatagaaagataaaatgatccacagcttggagcctgccatgggcttagccacagttggtaggacacataagtataccaacactgtgaacacagttctgtaggtagcataccctcttctccactcacaaggctcccttcccccagtcaacaggaatgggcagtggggagaaacctgccattattagacactaatgacttcctgggaagtggatcaacaaagttttaaagcacagtacattttatttattggtttcttatttgccattgactttgactctttcctttctcatgtgcactttgatacatacataaaaatatatactttttttgtgacacaatgctaagggagtaattgaaacaaacttggcaacatcccattgctataaattcacccaggctgtctgccactggagaacatgaaatgactaattgaaggataaacaatgcttatctcaacctaagaaataataataataacagtgatgaccatattttaatatgaataacagtttctttagttttatgtaaaaatgaataaaataatttttagatatcctatatttattgactggtaacatggaatctaaacaaaagtgttatttttatgcaaatacagatttaagagagattgccttctctctccctgaacctctgctttgacacacacacacaaacacattatcttatatatggaaatatggaaatccaccagccaccaaatttgcagctaggagagaaggcaaatttaggacctggaatgtggttgcttgttcaactcttgtgtacattgagttaaggtttaagctgctgtaccataaatgcagtctctctacctctcaactattcaagtgagcctactgagcccttgaaatgtggctgctctggattaacatatgttctgagtttaacatacacattgattgcagaaacgtagaatgaaaaaaagaatgcataatatctaaatatttttaatattgataacattttgaaatgataatattttggatgtattggctaaaccagatatgtaactgaagttaatttcacctttatttacttaatgtggcaatcataaattttaaaattacatatgtggcccctattatatttatcttagacagggtcacatctagataatggccagggacctagattaaactgcaatactatggataaagagaagaatggattgaagggacaactaatactctgcctcacttctgtatctctagtagtgtttgctcagtgtatcttaatttaacagctagttggattactgcatttggatcccaaattatgtcagactggaatgaggaccaaattaaacagagtgatgtagcatgtcctaaattttacccatacaattacaggattggaaaaacagctacggctatatgtttatttttaaaatagaagcttttcttttgtggtcagcttatgtgtcagttatatgatgtgactatcacaaaatctaattgcaggcttagactgcattaataaaatcttatttcaaagaccatatgacattctttacctactgtctactttgttgtgtttatatgtataagtggcttagtaggtttggtggcataaaataaatcatattttagaaggctcaactttagaatcatagtagagttggttgggggatctgttccatttgtaattcctgtaggctatcccttagagatgtttggaatacagttgtgtatatgggatgaagactaggagacagaaatgtgttgaaggcattgatgtgggaattgtctgcatctggatagcaagtaaaaccagatatgtagatgcattaatctaggaagaatgtgtagtcagagataagcactctcaacgttcagaggtagtttatcataaaaggagccaggaaaggggactgaggaaagcactaagagataggagtctataattccagatactttgaggctgaggcaggaagatcacttgagccgcaggagtctgaggctgtagtgtgctatgaccatgcctgtgaatagacactgcactccagcctgggcaacatagtgagatcccatctctaaagtaagggagagaatgaaggagggaaagaaagaaagagagagacaaggaagggaagggaaggaaggagagaaggagaaagacagaggaaaagaaagaaaaataaaagaggaaggaaggaaaggaaggaaggaagggcctgagtgcaggtaagcactcataaaataaaaaatcagtggtaaatcatgcaaatgtgttgtggcagctaaatgcatgtgtaaagaagatagtcctcagcagtgtcaaaaatactatgtggtctaggagtaaaggcttgagaagtttcttttaaagaaactttaaatgacaagagagttcttggtgtccttaaccagaacagtttcaatggactgatggagactgaggccagtgaacagtagattgagaagcaagaggaaatgaaatggagtcagtgagaggatataattcttacaaaacactttcctgtgacatactgctatcatgatctcttgatatgatgccttgagaaggacacagtgtcagctctgtggcattcttactaaaaaatgtaagttttcaaaatttaataatgaataaatatcagacaaacccccaatgaagaagagtctaccaaataactgattagttattttcaaaggtgttgagatcatgactgggaaagagaaaggaattgctatggattataggagactaaggagaaatcacagttgcaatgtgggattctggactggatcctggaatagaaaattacattatgaaaaaactggtcagatccggaaaaggcctgtaatttaatatagtattgcactgatgataatttcctagttttgataattgtaccatggttatgcaatgtattagctttaggggaaccaggataaggggaatatgggaactctttgtagtacctggaaacttttctttaaatctaaaattagctaagaaaaaagaattgctctgaaaggaaggagagtgatgggggatggctggaaagaatatgaagctgaggagagctcaaaatcatttcaaaaagtgaaaatgattgctgatgttttccaagaggttatcatatgccagggaccatgctaagtgctttgtggaaactttttcattccctgttcgtaactatactatggatggaatgttgttgttattccacttttgtagatacagaaagggaaacatgacaggggccaaacatgatcacacagcggtaatggtagagctcggattttgaggctgatttcctaaggcactgcagtatgtgtcttttcaaaacaggagagaatttggtatatttaaatgcttgaaggatgggtgcattagatgaagagaatagaaaatacaaggaaaagaggagataggaaacaaagggtgaaatccagcaaatggtgaaataaatattgacattgcatctgtggtaatagttggggaagtttaagggatcagtagaaaggtaataactgtgtgtcatttatactggttggagattgagacagagtcttgctccgtcgcccaggctgaagtgcagtggcacaatctcagctcactgtaacctctgcctcccaggttcaagcagttcttctgcctcagcctcctgaggtagttgggactacaggtgtgtgccaccatgcccggctaatttttgtagtttttgcagagacaggctttcgccattttgcccaggctgctctcaaactcctggcctcaagcgatccgcccaccttggcctctcaaagttctatgattacaggcatgagccaccgtgccctaggatggtctttaatttctttgtgaagcagtggtgaggccttcagctcataggaggaagatggcagggttggaaatttgagagagcagaaagggtttaagcagccagtgtggagaaacagagagagagagaaagaactggtaaagaacatgtagaggatgtccaggctgtgctgagaatgaggtggcaagaccacacctatccgtggttttactgtctcatatggttttctattatgtgatctctagttcatgacgtggactgttgaatttatccaaggttcagtttttgtcaggtgggtgccagaaaaataattgattaaggaagataaagatgttgttaagaaaaggtagaatggatagactcaaatctaaccaatggaaatgaggtgaagatagggtggtgctgaagaagtgacagcagtcagtatattgtttcaatttggatttctttgattagtagtgagtggtgaatgcttttcatatatttattagccatctatatttctcattttgtatatcatctgtaactatttttccaaaagataattttttgaggaatttgtaagaacagtttatgttttgaagatataatgtatttattcaataggtgtatttcaaatattttattttcagttttgtggtttgcatttttactttctttctagaagattttatttaaactgatagaaccacactgttcaaaaaatagccattaacaagtggctatgaaatttaaatgtaatttgaattgtttaaatgaaataaaattcctaaaatgaaataaaattaaaaatttagttaggaagtcttactagctaaatttcaagcatccagtagttatgtgtgggtagaagctactgtattagacagtgtacctataaaatttttccatcattgctgaaggttatattgctataactctgctatggaatttttttttaattgaaaaagctgatattgctttctttttattgatggttgccttcggattcatgcttagaaaggtcttttccattccccaacatgatataaatgtgactttttatttcctactagtatttctatagtttttttaaaaaatctatttacattgttaatatttctagaatgtattttgttgtattgaacgagctaaggtcttactcatattttacaaattttaacataaattccaataaaattaaatgaagtcgaaatggcatctttaacatttaatgaatacttaaatattcatagtttatttattgaatatttattatattacattgatttgttagaattagtttcgctttgatgaatatttatcaaagagattaatatgatgaagactaagacacgattacttcccccatgaaattcatagtttagcagagaggcaatagacacaacaaatatttacaatgctttgtgagtgtatttgtaggaatgtgaaaatgagtccaatgtggtttcaaaggttattaaagtggctctatatctgggaagttgtgagattagggttaatgtggagtttgcgcgtgcacgtgtgtgtgtgtgtgtgtgtgtatgtgtgtctgtctgaataggaagggagtgagaaaggggagagtgaggggacgataatatgataaactatggtgaaactaaattgtgaaatattttgtgtgtgactctcttgcttgtttgccatccaaagatttgttctctgggaagacagatctcctgttcagttaaggatcaattgctggctgggtagacacagaaacgggagatccctcagatggccgccctagttgcagttcaggtgagagctgaagggggcctgaactggggtattagcagtgggatggattagagagactctcagaaggtggaagtgacaggggttggtaataattggatttggaaggaatccctaattgattgatattccaaggtatacctgtagactgaagtatgcctccagttctgccaagaatgaatgggtttgctgacatgggacagctgagtattaggcaatgagtcattcaccttactactatcatttccttgtcaaagttttaataattagatgtgatatccttatgtttgaacatagctggaatttagcatagaagagaatcttaatgctagagaaaaattacttaccttggttcatcacagtgccaagattaattctggtaagagtgatgtggttacaacttttaaaattttaaatgtatgactcagagcattttcgcttttacagattttatctgaggcagactgaataaaccaggaaaaataaaattattatagctgaaagatttgacatttgattttttttattgcattgagggtctaaaccttaatttaatgacagtaagcaagaagaggttatccttgtctcctgcaattatatcttctggttttccttcctggaaaatatttaacagaacagttgattttattcacttaaagaagataatcaaacccttagccaataccacagaaaattaaatttagatttaacgggttttagggcatgcttttactaaatatctcaagttacgtttcctaagatttatggaatgaaaatatctcgtctagaagccaattttattgtttgactggtacaaatgagacatttctgttaatattacatttgactaatatatgttctattaagatattaaagagtcacagttttcttagaagattccttttcctttaccatcttcctttttatccagttggaaacaaatcctttaataattttttgtttaatttcactgttcctgctgttcacaaaaagagtcaaagaagtttaagacttatgtgcaataattcactagttgaatgtcctttgattctaagtgttgtttttttaattccataaggcttgcaaaaatttttgtttgctgtggtatttactatagtttgggaaaataaagtgtgtccagaggaaatttttaaaaatagaaaatctaacgatgtaactatacagaatgaatgtatgatattttcattttatccttttaaaaggacattttacttacctcagtgaaattaattctttttcattgaggtgggttattgactcataaaacagcaatgctcaaacgacctccctttcagccactcccctcaaatgtctgcttctgaaaatcaattgctcaaaactgatgatagcaaaagtggttaggatgtgtttagaggatgataaatgatagggaaggacttttcgtaaatatgcaacctacaggatactttctaaatttactggtaactgtacatcgataatcctcagtaaataaactgaaccttacaaatgaatcagacaagcaagaactcatcacccctcaagtaaattatttctaagggaactggtaaatattttgaaaatatttaaatggatatttatgacattgattaagtgaagccccatgcatattctccatagtatcattttattgtaattccttcactgtactagaaggagctaaatagtaaatattacacagcctactctaggttgtttagatattaaaatagcaagaaattataagatataaggaatattcaccaaaggtagtgaaggtaggtattaatggagacaaaattcagttgtattccaaattctgccccttgtcaaaaatatagaagtaatccagttagtaaccatacatttttatgaacaccattttaaagaaaaatagaaatgaagaaaaggagccataaatgtgtggaaacaattgaagtgtatataaatcaatgttgaacttttcatcatattagattcatagcatgagaaattgatattagatattaaggatttttaaaggagtataataatgtggttatatttcataagagtctttatttcttaaagatatataatgaaatattacaaatgaaataatgatgtttgggattttcttcaaacaaaatataatggaagcgtgaatagaaggactatggataaaaaagattgcccatgagttgataatttgtgcaactgggtgatgaatccattgagatttgtcatactatttgtgtacctctgtatatgcttgaaattatacgctacactacacacacacacacacacacacacacacacacacacaaaatcatatactatctcacattaggtagcaaacagcaagacacagttaccatcccatctgaagaacatagctactaccagaaaccatcatcatcatcatcatcatgacatttaatcattacaccaaatccatttaggtgattacattactcttatttttcagaagaggaaactaggacttagagatattaacaatcttttccaaggttagatatatattgaatatcagaactggtgattttaaggtctatttactttcctacattatgggtacacttgctagagtttagtattctgggttgcctgtggacattgtacaaggatgtgtgaaaataaattaaaactacctaaatgataacaaactatttattcagagtttgttatagttccacataccatcacttgcacttttcagagattcagagataggcaggagggtggtaaagccttatattgaatttaaaaaagcaaagatactatacatgctctgataggacattcttggcatgggaaagctggaggtaagccatctggaagtggggcatcttacgtgtttggtttgggatgcatatttggatttttcttttggccctgagttgagactagggacaaaatgtagggaagctgtctgaagcctgcagactgtggtttggtttcccaggctcattgctgtggagattgtgcattagagtgctattttcatatattgtgactatatatatatatataaaaatctggcctttgtgtatttgtatgtttagtctcagtctcacctttgcatcattctcatggaaggcttaagaccttcaccatttacggattgttcagttgtacatatagtcatcatttcccaagatcttgacctttttgttgtgttatcatcatggctatcatctgataagagagtggctgcacagaagtatctaagactctagatagcatgcaacagatcagcatcatgagcactatgacaaaaagaagaatagtttatagtccttataagatgttttgggtccaagaacctaaattgcccaattcaggctgtgagaaaaatttctacagggcatgaggatcaccttagagatttaggtagctttttcataaggtagcatatagcctgtactaccttgcctgttttattaattcatgtacagcaagaagtattactattggcacagattccaccatggctagccaacaagaaattagagcaatgatattatgcattactactgctgatgagttaagactgatgtgtattacatctagggcagagttggtactgttaataacttctgttagagttaatgttaaatttcttagtcttttctatgtatacgatttctggtgttgggaacactgttctgattattcatataaacaatgagtcagtaattctccctgatagaatgcttcaaaggtggcctcattttggaacttgtatttgagtcagaatttccagccttgatgatttatagaatcagggcctctgtgtaccaaaaagacttgaggtgttagcctgaggcagatgagaccaggaatttttgtcacgaactggacagccatggacaaaaagaattattcatgacatgaggttggaaccaaggcctcacattagctgagtttacctatttgaatctctattactgtcttcctggcatcaagtaattggcccattgtccagtgaagattatggaattcaaatttagaattatatagagtctgataaacaggcagtaagaattggttctttttctggtatagagagacaacagcaaagtcttaggttgatttgtttaaagtcatttgtccatgtaggtacaagtggaaatgtcactgattataatttgctggggtatcatttgatgagactaggattgctcagaggttttttatcaggggttctggttctggttgacctatacagcagtctgtaatattgagggcagtggcttatttttgaaaaaaaaaatataagaatggcattagaatgagtatgttctgacttaattataatagacaaaaaaaaaagagaaaaagaaccattattagtggatgacaatcagagctctatggaaaataaggagagtggtaacaggtaagaagattgaaaaacaaacaagaatgcaggggttttaggttggatgtattgggtgcaagctgtctactgtccaagatcatctttttctggaggttttggatcagccatctgcttctgaagaccaactatttctataatatctctaagaattctgtttaagtttttctgttggagtagccttccagttgtatagaatattgaattgcttctttagttatgaaacatgaatccaaggattgatctctggagtttcaatgatgtatttgttgttaaaagtatctgataaggtcccttacaggggaggttcaagaacagttttttctaatgtctgttctaataatcaggatctcctgttgaagatcataaagaggctgtgtaggaaaggattgtaaacaagttaagaagtcaatcttaacttattggtgataaaactgagtatactacatgagcctcttttgctattttgtcatatttttgtgtagcagggtagtctaatactgtaggtggtgtccataaatgaaggggccttccagttaccagttcatagatagataaccagtaattctctgagcaggtggaccatatggccataagtgctggtggaaataactttggcctcccaaaggaggctcacgtccttcagaaagcttgctaattttaatgatgctagtggttcttgcaacttttctagaaaattgtgagtaataaaggcagtgtcatttttgagtaagggacaatgcattacaaatttcttttacaatggctcccataaaacatgagccttggttacttgttataaaagttggtatgccccaaattagaaatgcattatcaaggagctttgtactgattgtgaaggctgtagcttttcagcaaggaaatgtttcaaccgatcctgaaaataggcatacaagtttcatggagaatggaaattggacaaaacctatctgagggtgttaagggttcttgaggtttcacatccacctttatagtttctccaagatgctgttgggttgacaggtgacacatgatctaaaaatagcctcatcagtccataaatcttccccaccaatgatgatttaagatagtaaccaatttgtctgtaccatgatgagtagttttatagagaaattttgttcatatccattggaagttattcatgtctccagtgtcctcattgggggtgccagagatgatctgtgtgaaatgtgcaaccagagtttttccattcttcctttttaggactttttaggaacttaacattgatatttcataacggcctttttgaatatttcaagggatttattctttgagagtttaattaggctcataaccttggtgaagcctgcttattggcagaatgatctgctatagcattttccccaaactttcatactatcagtttttgtatgggcttcaacctttgtaatagtcacctccctaggaagcatctaaaagtttctttttttaaacttttaagttcaggggtacatgcgtaggttatataggtaaacctgggtcataggggtttgttgtacagattatttcatcacccaggtattaagcttagttccctttagttatttttatagatcctctcactcctcccaccctacaacccctggtaggcataaaaacacatacaggtaaatgttcactgcagcactattcacaatagcaaagctatgaaatcaacctaaatgcccattggtggtagactgcataaaagtttcctgtctgtttttgatggaagttccagcagagatgagaaacctccttggttgcaaagcatcccaaagtcatgtactactgcaaaagcatacctgctctatgtatgcatgtttactttctagggttttgttagattgtaagctctagtaagcataatacgttctgccacctgagctgatggtacctcagttggaggagtatagagtgtcctcccttggtatctgctggggattagtttcaggactcctcctacagataccaaaattcaagtacactcaactttcctatataaaatgtaatatttgcatataatctacacatatcctcctgtatgcagtcatgggccacataacaatgttttggtcaatgacggacttcatttgcaacagtgataccctaagattataataccatacttttactgtacctctcctatgtacttaccattgtgttacaattacttatactattcagtatagtaacatgttgtatatctttacagcctaggagcgctagggtgtaccacatagcctagttgtgtagtaagctataccacctaggtttgtgtaagtacagtctgtaatgttcgcacaatgataaaattatctaacaatgcatttctcataaagtatccccctcattaattaatgcatgactatactttaaatcatctcatgattgcttaaaatacctaatatatgtaaatgctatgcaaatggttgtttactgtattttttatttgtattattttttctaatttttttaaaaagctatttgtataaatttatggggtacaagtgtaatttggttacatggatatattgcatagtggcgaactcagggtttttagtgtatccttcaccagaataatgcatattgtacctattaagtaacttttcatcttcacccctctcacccctccacccttcaaaatcttcgttgcctatcatttcttctaagaactggaacaatacaaatatgcccactttcaccactcctattcaatatagtactggaggtcctagccacagcaattaggcaagaagaaagaaaagacattcaaactggaaaaaaaaggatgccaaattatccctattcactgatgatataatcttacatctagaaaaccctgaagactctaccaaaaaactagatttgataaatgaatccagtaaagtttcagggtacaaaatcaacaaataaaaataagtaaactttgtatacaccaataatcatctagctgagaatcaaatcaagaaggtaaccccatttattatagccacagaaaacctcaaaatacctaggaatatatttaaccaaggaagtgaacgatgtctacaaggaaaactacaaaacactaatgaataaattgtagatgacattaaaaaatggaacaacatcctattctcatgattcagaagaattaatgtcattaaaatgaccatactacccaaaactatatattcaatgcacttcctaccaaaataccagtgtcttttttcatgaaattagaaaaaaaatcctaaaacctgtatgaaaccaaagaaaaaaaaaatcccgaatacccaaagcaagcaaaaagaacaaagcaggaggtatcacattacctgaattcaaattatactacaaagctatagtaaccaaaacggcatggtaccagtataaaaacagacatatagatcaatgaacagaatagagtagccagaaataaagccacatacttacagccaatcaatctttgacaaagtctacaagaacatacattgggaatgaacacgcttttccataaatgatgctgggaaaattggatagccatacgcagaagaatgaaactgggcctctatctctcaccatatacaaatatcaactcaagatgggttaaagacttaaatgtgagacctgatactataacaatacttgaagaaaacctagggaaaactctcctgaatattttctatctgtggttggtggaattcttggttgaggagcctacagatgtggagggccaagtgtactctaaaggagaccttaaattagtgagggataacatatcctgtttgataacctcaagtttctgttttgagacatccgccaacaaatcatattaggtgagagtttccaatgggaatctctaacaaatctgagtgaggtacataaagttccttcacttaggtaagataattgtaaagtttcccttcttttggtaggagcaggagagtgggaggacttagggtactgtagtggtgaattttagtaatgtgggagggagacagtaacagagtctcataagaggttaaccaactggctgaaaagcattgtttgctcttagtcagtagtaatgtctgtactgtgtaaggaaccatgaagtcaagtggggagctaagaactaattcagcagaagcattgacaatttttgcagcagtggctattgtcctgagacaaggaggctaagtctgtgcaaccgggtcatgggtgcagttatagtaagcagtgtgtttctgatgcttctcttgaatttgagtttaaacctcaacctgtccagattactcatgcacaaatagataaaagagctttttgtagttaagggtacttagagaaggtgaggctcttaaagagccttctttggattacagaagccctgttcatgtttttcctcttagaggagagtatcttttattgaagccctagtcaattcataaagagatgttgcaatcccagaaaagtttggcactcattatcttcagtatcaattaaacttagaatttctctaagttgtcatttattagagggccaggacaagttgaattgtctttataatgagagtatgttttcccctttatacataggtcataccctaaataattgactctattttgacataattgtaatttattttttgaaatgttatgtccttttctgctaagactgagagtaagtggaattcctcttacaggctttgttgtcctgtgaacaaagtaagagattatctacatactgtatcaaaactgaatcagaagggaaacctatgtcttttaagtcttatttgagaatctaggaaaataggagggtctttagtgaacccctaaggcatgactgtcagagtatattgttgcactccccaggtgaaggtataaaggcattgacttcactacagacactctgaaaagggcagagcagagatctgtcccagtgcagcaagtggctggcatttggaattgatgagaggatggtagttaggttacattctatggggaaattaaggataataattttgtggatggccctgaggtcttgaacaaatcaatattctcacttctttggtttctttactggcagaacgggagtgttacaaaggctagtgtagagtatgggaaggtctttgatataaggcttttatctataggtttaagtccttcctttgcttttggatattgggggagtttggataactgtctggtagaatctgtctgaagtttaatagatttccctctaattatttttcctatatcagcagaaattttagcccatgcaatgtcaggtaaaatgttgtggtaagcagaataatagcccctcaaagatgttcacctcctactgaccagaaactatgtcatcctatatgtcaagggggttcagtttgtagatggaattaagattgctaattagttgacttttacattatccaggtgggcccaatataatcacagtggtccttataagtagaagaagaaggcttgtgttagagagatttcaagatgccccactgcttcttttgaaagtggaggaagaggccatgagccatggaatttaggtggcttttaaaagataaaatacgcaagggaacagattctccctgtgagattctaggactaatgcaactctggtgactcttgattttagcccagttagacccattttgcacttatgacctacagaactgtaaaataataaatatgtgttgttttaagccactatgtttgtggtaatttgttacagcttcaataggaaactaatccatatatcaggagctttatctgtggtaggcatcaaatgtaatggaggaggcaaagacataccagagcagacacaatttgataatgaatagaggaggactctggaacctcaagaaatagttcttctggtttgcatttcatactacagtttaatttgcaaagtaagtcacttcctattaaaatttcagggattttatcacagagaaggaaggaatgttttttactcaagagcccaaggattacagttaaagattgagatataggaacaatctgtgcattatttgaaaaacctaccacctatgttgtatgtttgctctaaggaagaggctgaacaaaggtaacagggtgtaatgaagacagagtagctcttgtacctgccagcaggttgaccatctatattacagttaattcatcttgagtgtttacagtaaggtaggatattgggtgctttttctttcttcagattaccctcacagatctgaattgagagatttttctttgacttggtgtttattttgcatgatgggacaatccttttttccagtgtctcttctgtttttaatacttgcaagtatccttttcggtaggtgatgggtcagaaagtgagctacctagctgtttgatctgcaggtctcttaagtttattttgggtcttgtcttgtttgggttctgaagccctttaaaaatgttctgtatgatattgtaactcaggtaaaagagtctacttcttatgctaatttctgtttctaaattgagtctccaatttcacatgtaatccattgacaaatatcctatagtgtcatgttttctctgtttgcatgattgaattatagcccaatctatttttactgtagctgtttcaggactaggatatttttttctaccctgaggtttattgtggaaagagggatcatctaggtctcctttttgagtcattccggtccatttttgtcatttaggatttagtgtctgaggttccaaccaacatacatttaagttgtcataggtcaagtatctatgggttgtaggcactcaaaatagtctaaattattccatgagtacgtgctagtcttgtgtggagttaggaaaatccttaattatagcttttaattcagctcagatctgaggcctaaattctagaattgcctacatgcctgggaccacttgggactaggacggatgggtctttagaggcaactgggattttagggttttaggagaatcatttggaaaatgtagggagtccagacaaggagaagtgaagggaggagatgatggaagagtggcaggagagataatataatgaagggggaagaggcaaaagggaaacctggatataaggaggcaactgaaggactaggaaaacagggatttactagggaaatgcatctcgcttgatttttaagtttgtcaaaccgagggttagcctagaccaaagcatcttttagtgaagaagttttagtgaagaaatcagaatttcatttggagacctctgcacaagagaaaaacgctgctccttaggcctgagaaatcttattccttttttttcctaaggcacctctcaaatgaacattttttttcaagtcgaagtagcctttggtctcaatatttttttttgtgaacttgtgccatttagagagctatgctcaagagttacgactgcaatgacagtacataaaagaagcagaagtttttcttggaggagaagacctagtcttaacctcatgagacctgccaaaacttagtcaaaagtaatgcttgtgtacttcatgtctcaggtcctcaacaagtcagctgcctataaatgcagacctgacaatgtatatcccctggtagtgagaggtgacaacatgctagcagccctcgctcactctcggttccttgttggcctcggcgtccgctctggccgcgctcgaggagcccttcagcccaccgctgagctgtgggggcccctctctggggctggccgaggccagagccggctccctctgctcgcggggaggtgtggagggagacgcgcgggtgggagctggggcttacgggtggccaccggcgcggttccgggtaggcgcgggctccgcaagccccgcactcagcggcacagccggcaggcacctgctgggcttgactggggggcgagctccctctgggctgccagagtggctggctaggtgccgcaaagtcccgcgacgcatgccagtgacaggtgaagccggctgggtttctgggatgggtggggacttggagaacttttctgtttagctaaaggattgtaaacgtaccaatcagcactctgtgtctagccaaaggtttgtaaatgcaccaatcagcactctgtcaaaacggaccaatcagctctctgtaaaatggaccaatcagcaggatgtgggtggggccagataggggaataaaagcaggccagctgcgcaagcagccacaatgcactcgggtcctcttctggactttggaggttttgttctttcgctctttgcaataaatcttcctgctgctcactctgtgtccgtgccagctttctgagctgtaacactcatggcaaaggtctgcagcttcactcctgaaggccgcgagaccacgaacccactggaaggaaggaacaactccagatgcgccgcctttaagagctgtagcactcaccgggaaggtctgcagcttcactcctgaagtcagcgagaccacgaacccaccggaaggaataaactctggacacatctgaacatctgaaggaacaaactccgggtgcaccatctttaagaactttaacactcaccacgagggtctgcgacttcgttcttgaagtcagcaagaccaagaacccaccaattctggacacagtaggctgaacatcagggacaaaactcttgtctgaatcaaagcaaaacttcaggaccccaaaaacaaaatagaatagaaaaaagacctcgtccagttttgttggtgactcacagcaaagtttgtacaaatggaaactggtctggagagaaccgaaagtctgtgagaccagctcaaactataggcttataggactcatgcctgtgctctaccctgggattctcattctaatgataaacgctttcagacagtccgacacagaagaatgaaataaagcaaagagggtgagtaggaaaggcctgccaaggatgtcaaacaaatgggagacaataacaaaacttgggtaccaaacagaataaacagccaagggactcagtgaaaagatagctgagttcagacctcatgctgactttccacatctgcatggatgcaagccacaagcagcaagctgtaagaggtatccatgggtactgcacctgattgaaacctagggacagaaacagtgggtggtgcagaccatgtctcagtggaacctctagtaatactgggggaataacaaagactattcaaagcagaataagtggaggtattcacacacagcttgctacagcaagggaatcagccaccatcacttgcctaattccaagacaggcagggggatgcggaagctttgttcaacaaatacatacatgttaaatagttccagttgtgctctgattggacattattgccatggggaagctgaaggtaggctaaccagaggtggggcatcttatgtgatgggtttgggggatcatttttggcttttttggattggtcccaagttgaaagcagagtggagacaaaaaatagggaagctgacagtcattaagaaggtcaagtcctgacctttctgagccaatttctttaggagttacggtttggctttctaggcgtattattatagggatcatgagttagagttctattactatttatgggctgaccattgggattggtatactcagcatctcagatggaaggaaagtgtcagaataggttcatggagaatattgagtggtaagaggaccacagtctgggcaagaaatttcaccctgctgttgatttatttatttggaggggagggtgcagtttctggtagaatagtttctagcagagcaagatagagttggttaagattctgaaagtcctacaaattattaacaagcctcagcataggtagagtaagtcataacagaagctagatgtagttaattccatctcatatcctttgttataaacatacagaggcataccaactaccacaaccaagttgctgtaatcagccgtaaagaaaggggcactatttgtagttcaggctgtaatgttttcagcttgtagcacatccttaatgaggataaaatgcaggtgtcttcgttgaatggatcttgaagtggaattataactagattttctttaagctgcatctgttagataaaggtggaagcagggagaaggatgcagagaagagacaggagaggagggagctctcaagccaggtttttcacacagaaagttctgcggtcaataggttaatggcaaaatgtttacttcaactggctgcctgacctggccaattatggcagaagaataaacaaaggaatgagacaatgaagcgggatagagttggaggggatttgtagaaaataaaatgattgtgtgcagtcatttcagtatatcttggttatgtttggaatatttggaaagataacgaaaagaagtgatcctgctaagtaagagctttccttaaagtagtagagataagggaaaaaagctaagctgccagacagctgcagggaaagccaaggggctggtgaatcaggccaatggaatacaacattgataagagctgtaattgcaaaagtgcagactgagaggacagttaggagaggagattgaaatcagttttagaagagagagtgcatccctttgataattacccttctgcatcttttgtgattagtgtacaagcaatggtaagttaactattccatttttaaaatctgaccattaaaacaaaagaaaaggtactcaatcagtcagggacttgcattaagtcatgataatagtattagtgacgatttactatgtgccaggcatactgccttaaacttagcactttaaacacatgatctctcatttaatcctatgaggcaggtgtatccttaacactatgttatagagcaagacagttaggtttaacgagaataaatactctgcccaagtaagtggtgaacaacttaaattcatggctgtttgatactggggctggagttcttgaccattgtagtcagcacccttgcttagagataattaaggactttgtttacttggtttgtggagtcatagaacaatgcttaaatctcacaataactagaatgtgcaggactggaagaaaggcaaagatcatctctgaggatgtggaagaatgtaagctctgattatagaatttatgaaaacattgataataagacagctaaccatgagactcaaactacctataattttttttgactttgatttatatttgaaaagagaaccttgcttctcattacctttctatataagtatatacgtttatgattagagttccctcctctcaactaagtgctggaggctgtgtaagtagttttgtattttgaaagaattaaactagacatcttagggagagtatccatggagctacccgcagtctgtgcccacacatacctgtgatgttactcaataaaccaatattgccacctgctggtagcttctctgaacttcagacacaaggttccaaagtccttactagtaaaggatgtgttttaaagggaaatgaaatcatgacacccaaaacatttacaatgaaaagccagaataatttggggcctcacaggcaccaagagaatcactaatttattcaaagatgattttcatttacgaatagataagtgactatttggaaactgatctctttgacctgcctctgttaaatcagcctccatctcactttcaaggtcagtaaatcctgctaagaacgacctgtacatttatgcctgttcaccaggtttgtggcccacagtctattagcttatttatatgatgctgtgattatgtgaatgaacaccatttccttgaaccaagtggtcattgtctccatgatattctcagtgcattttgacctttgtgcttccaaaggatgaagatttttctttcctaatttaaaactttaattttgtggttttattccagtttgtggcatggcttctagtgattctgccatttatgctgcagctcttaaggaaaataggcatggttaggataatgtgttctgatggagtattctggaaggccaaacgaagaggctggccagaaaaatcacaggtgtggggttcactcaaaagttcttctaacttattccacttatcaaaatgcccttcaggctcaactatgttatttcaaatgacaggagctcctttttttttaaggctgaatatcattcccttgtgtatatatgccacgttttctttatccattcatccattgatgaacacttaggttagtaaaataagccaggcacagaaagacaaatactgaacaatctcacttttatgtggaatcttaaaaagttgagttcatagaagcaggaagttagaatagtgattaccagagtctgggagaagggagattgggaacatattagccaaaggatacaaagttagatatggagaagtaagttcaaaacatctatagtacatcaccctgactacagttagaagccatatattgtatactagaaaattgccaagagaatagagcatattttaagtgttctaaccacaaaaaagacatacatatgtgaggtaacgcatgtgtgaaatagcttcatttagccattccacaatgtatgaaataccaaaacatcattttgtacaccataaatatatagtttttatttgctaattttaaaaagtgcttctaacataacaagggaaacgtagagctatcactgttcttcagaatattgcatcagtaatatagtgacacattacttatgttagttaaataaaccattaggcaactcacttgctggcagtccaatgtgagcaatgttgatgtttaactctttttattaatagttccttgtatagttgagaaagtgtacaaagcaataaaatctgactcgaagcaaaggagacagacaacccactatggcctctcttccctctgcaactagtcgctctgaaagggtgagccctctctacttaccttcttactatgagaggggaccccttccgaatattttgtttgctgactctctccctctccctcccctctgcattgtaaatatttacatatttttatttttaaccaacatgcattacaataactaatacatacgtattatagaaaattatataatacagaaaagaaaatatttaattaataagctattaaataccagccacatagtaatactattttggtgccctctgcaaacataagcatatcatcattttcattttacccaaaataaattataagaaaaatactattcattaaacttgttgtttctgatatagcaatatatcaacaacaacctttaagttaataattatagatctagatcataaatttttatggtcacaaagcattccattatatacatgttcattattgttggttgctttaatagacgtcacctctacccctaattaagatatgtttctacaagtggcattgcggcatgaagcatatacacatttttaaagtttttttaaatgttggcaaatggttatctagagaatgggaatcaacttatactatcactagcagtatataggacattagtaggtgaaaaataggtgttatagcatggctttgatttgtatttgtttgatacaagggaggttaacacttttcgtatgcatattggttgattgtgtttcctcttttttgaatatcctatttataagcttggccatttagattttaaaaatttatttcaaatatttctcatttttcttatttattttaagcagctttttccatatacaatattacatgtttattcatcagatattacaaatatttattcaagatatttatttgctttttaatagtactaataatacatggctttaaaaatattttacaagttttatatttttattcagttaaacatattaatcattctttttaaggcttctgactaatattattccttaaaagtctttctcaaggcagggaaatattagcgctctattttcttttaaacactttattttaaacgttaattaatctagaatttattttggtgtacatttgagaaaaggattgaacactttttctccccaaattattggctgggataccacataaaggatcctagagggctggatattctttgaaacttcatgccctccaagtggcacagttgggatgatgtgagctgcaagctcagaggctggtcaaagaaacaaattagcgtgtagcaagagagaccaacctctaactcactaatgttctacatttctttttcattgaatataagaagaatcactattgatgaactagggcatggctgcattacagttataaatatttaaatgggaaaaatggggggaaagtctactgaaggcagcactttcatagtacaggagtgagaaggaagcctgatgggtgtgcagatggacttctgaagggagcgtagactgcattaggaaggacactttgatgaatgatagaggctggtctccttcctgggtctgtacaaagcaatgcattaggatatgatgagattcgtagagcttgtggtttttaaggaaccacaaagtaatttggcaaggtagaatattttcatcagcattcatcattattaatatcattgtcattttaaaaaaaacttgaaagttagagcttgtgttggaggataaccatgtcatcatacttgaaaaaagaggatgtatacactttctgattttgtaaagtaagttgattattcctattctaactatcttctgaaaaggtaattggaactcatcagctccttttcctggcttcagtctccttgggatgagaaggaggagattactggattctgaagttttgtgctgatttgcctcaaatccaggcctgtctcatccaggttcttagaagtctcaatgagctaagtaaacccaacttagagggagcaaactggacaggtgaggaggcatagcaaaggtattagtaataattgctgttattatagcaacaacatgaaccacatttatagaatgcctgccacacttcagccactatttcttgtactctatgagcagtacttcggttactaatagctgagtgccccagctggggaatctgctttctacagtccagggatggaggaagaaggaatggaggtactatctttggaatgaattttctaggtacaaggagggattcttgatacttaatctatcctgtgttcctgtgtgccaagctgagaatcaaagaggttgtttaaaatcggttgtctgaccttactcataaatatcatcatgtctacattattgttagtgtattttaaatgattgctgcttgtctcttacatccatcctactaatcttcatcagaccaacatgctcctcactactgattggtatttgccatcttcttatttgtctcacgtgggatgtttgttgaaaatggagattcctgagcgtgccttcagttttagtaccaggtgtttccactaaatgctggagtggtacttctccaattatcagtgtgttcaagaatcctatggggatcttgtcaaaatgcagaatctgattcaagaggttggagtgggccctgagaatctgcatttctatcttttcccagatgatgttgatgctgctggtccatagatcacacttcgggcagcaagagatgagagtgtctacactagttactatggcattttagtccctctatgtctttggcccattttcaactccccaaatgacttctccaagctccttatataatgtctctgaggcagtcaaaccaggctctggagtgttctccaatagtgctacctaggttctgccttggaacttttgctccaagttattatcactgttgttctttctgatccacattcgttgaacacagacacttcttgggagactttcccagtctcatctcataggtaaggctttttccaacagccccagccctctaatggttcctgctctctgacctcctgtgcaaatgccagtcatctgtcctcagtgatgtgtcaggagcagcaagtcccagaacttcactcttggacgtatgagaagtttagtttagtaaaacgtcttgttgaaggaaactgtcccattttcccttttgattttctacaaaggcccgctactaggcaagagccaaggctgacatggagacagctcagccctatttcaaaagctgaaactctctttactatcccactggatgcacaggatgctctcactggcccatccctgtcattatctcagatatgtgctgatgattcagaatgatcctgggtgtggccttaaggacatgttgaagcacccctatcactatgaggtggccatggccatgtcttcctcccttctctaaatgtaaagaaaaatatttgtatttttacctagtttttctttgccttagacttctggactatttcatctggatctgtaatttttgcccatcaggactctccttgatgtctttgttctatcttggtaaaatgcaaacgttgaagccttttttcttaatcctgagttatacactttgaatctgctttggggcattctctttgcccctatgaaggtaatgcacactacacaatggaaaaaaaaaatgctctaaggtattaatcccaatataatggaagacaagttgaagacactggacttggcaacgtgtaaatatgggaaagaattctgagactttctttagtgcagaattcagagcatcttgatgtcatttggcccttctcttagaggcgttctcttcttgcagttttcctggggttgtaaacttatccccaaataagacaatctcaaatcatttttcaaatactatcagttcaatatttgttgtctccatcttacttttaatgggaacatcaaaatatatctttagatagtattgggcttgagccagacaaaagttcatgttgctatgagggagaagagagagagcagtcaattttgagttcctttgttgttttacacaatcttagtcctaggtacagattttagaatagtatttcatgttctaagagtagtttttatacaatgattagacctttaaatttttcaacactctccccctaaagtttttaaggtcaaaaatcatgaataaatccatgcttgatagactaaaaggttttggcttcagagaattgtcagtagacttcaaattggagcagcctttcacttctgttacttgagagttattgataaatttgcacactgctggctgcagtcctaatgaatatattcatggaccatggagcatggcatggtatttagagaaatccaaaatatgattttttaaaaaaaatagagttggaaatgttattggtgatttaatattttaaaaaataacaagaatatatgctattttgcttgtaattccagattaaatgttaaaaatgtaaataatagatgataaaccacaaatgatgttcttaggccattcagtttaagccacttttactaatgctattcacaacacagatgaagtatttataaaaattaagaggtttagcgtggtaactcttattaagttgtaacctttatattgacagaaaagctaggataattataagccatgaatatctcaagaattaatgaactgcaagtctgataataactcatagggtggggataggaagctttcacatttaatgaccatttctgtagtctagagttcagtttgaacttttatttttattttcagtaaatggattataattgtaaaatgtccaattagactctcccattcaaaaggagagaacagcgcacttctgatcctgaaatttgaatttaactgggcatcgtgtatatttatttattaaatctcgcaacccacatttatttatcctaaagagagataagatgatgagctcagtgtaggactgaattttataatgcctagaattgagacaagccccagtgggtcctccaaaattgtttctgggaataatgatatttatttgctaataatgaatataatatccatgagaggagggctcttctttttggagggtgctttaactagaggatcttagccagaggagtctatgtcatgcattcacagagggctagtgttctcctagaccaaaaagggaggaatgggcacactgtgaacctcaaatgaggtggcatcttgtgcttagtttatttttaatttaaagggatttagtgtgtaaacactaaatcaccaggttcctatgagccactcccctatcattatattagtgagaaatagtttgccaggagccatgacaaatggtcattaggagtgccatgttaactcagtgaaggtcatttaagtcatccactggtcatttatgtttccctctttggtaaacaccacattttaaagaagtggattaattatcatcaaaatctagagctatatgctaatagatatcaaggtagttttagaatttcacttttttttcagaagcaagatgatggctaagtgtttgatatgatatgatatgttgatgtgatactgggaatataccttttaaggaaatttcaggaaatctgaaatcatggacaacagagataaattatataaaaaaggcttaaatgggcgtgtacttttctcatattaattaatttgtgttctttcttcatttacaaaggtacgttatgaagatatattcttgttaaaatttatttagtaactcctgaaatcagttatctgattagaattcagctttgtttaaatttcatctttaaaatcttaactcatgtatattaaggaaaattagaagctgaaattcttcttgagaaaatgttattttaaggttcatatattgatgttttattttattgtaaattatttttatgtgtagactatgttgatgttttaaatgtggggtgaccataatggggaaactctgcctttccaaaaattttgggctttttttttttccagtcttattttattctaacttcactggctgcagcaacatacatccagtaaacttaatcttctcccttactgtgtaaaactgtggatgattttgtgcctgcgtttatccacatggatccccattcattggacaattggataatgtctaaaggctcctaactttttcgcaaggaggaaatgctgttaattttctgctgccaggtgaacgcttcaaggcagactgaatggcattgagagaggtggttgttactcatgactcctctcctaatgggaattctggtgatccaaaaagagggatttgtgactgtagaagccaattttccaattataaaagaatttagctgatcatggacaccaactttttggaaactctcattttatttagtattttctaagtatttcctaaaaatgatgttttattttaaaaagatgagtcttatgttgatacttttcatttattataaacttacctaaaaatcagtcaacacctgtaaaattttggggaaaacaaatgagtatatgagatagtggagctgtgatgggtacttcactttgcttctgagctagattgtttcaactctgcgcctaatgcctgagagtttgtgtatagtcatatctttcgatatctttagagcctaggtttagtatcagttgttttcaatctcaactgtccagttgactcaaaaaggaaagctttttaaaaatcttgctgtgcctgagctttataacttgggctgccaaatgtaataaataagaacatgggatgtttagttagatttaaatttcagataaacaagaattattttgttactataagcatgttaaagaaataccttctgtattttatttggcaacactgcccatggccgatagattctggcttaattgctctgggctgaggtctgaccattggtgtttttataaattttccaggtgagtataatgtacagccgacttgggaaccactggctagcttggcagtgtttcacaaactgtagtgtgcgcaggaatcaccagaaatctttgtgaaaatgcaatttccaaattcccctccagttaattcactaagatggagttacagaacgttaacaagcatcctggttaattctagttacaggtgtgtgaaccaccacactttgacaaacaccgttttagggcatattaacaagcactgctatttcttttatttttaaattagtgttgtggtcttgttattttttaaaactcagaataataaaataccagggtacagcataatgcactggttaagtatgaacactatttttatatattagaataaatgatattgattaggaagatgtttttcggaagaaaaatcaatatgaattgtgtcctgttgtttgctatcatttcttaggtagcaaataaaatacatttatcttctgaattggaaaatgggtctgtgatgacagtatgttaactttaaggaccccatttttctgaggactctaatctttggtaactggagaaaattacctttggagacactaaacctgggaattgccactaacaatttaggactggttgtaagctcctgctgagcaaaatggctgtgagaatgcattccacaaggttaataggcagatttttttcaagattgtatatcaggataaataatgtggataattgacactgctagtgctaagggcttttttttttattttattttttatgtggtttcagtaatagagcaaagacattctgtctgattttagcctctttgtttttgtgatttctgagtttcaaatcgatatttttcttaaagaaaacccaggcaagtaaatattatgtgttattttcaagggccatttaaattgatggaaatctctactgctattaatgatccagagtaattccttactggtgtgattatttcccataatctattaaggcattattgattaaccacaaagcccattttatattagtagacatttccatatgccatcattgacctcacatggttcttttagttagtgtagtctttggtgtatttactccttttgttccaatttccttcaaatatggaaataacttaggatatattttctaagtttctctgctttagcaaaactgaacaattactatttgcttgttattacaaacatttactagctactcaattggatcaacctgtctaaattctttgtggcattgtgactctataggttaaaaggctactattattctaaggagacttgtgattgctttcaagtcctagttctgtttgttttgttaactttgagtctagtaaatcctcgcagagaaactaggaaatcaggtttatataactctttacagttttcacaatgacttcacatgcatttttaaaatttggtcctctcaggagttgtgtggggtctgcagggcaggagtaatcatgaatcccacttttcaaatcaggggactccagctttgaattttaagtggcctgtgctgataagtctggaagtgctggaatttttccttaaatgtggaccttctgaccgcagtgccctttccactctatcataaccttctcttattacagcaaaccgaactaagcaaaacaataaaatgcaattggtagatattggttcacacggcaatgattacttaatttttttaaagtattgatcagaaaggaggtagaaaaagaggagactttatcacaagtagaaaaagaagacacataatgaagtaaagatttgtaaacaagctgataggaaaactcatgaaaaatcttcaagcagcatgatcatgttcaacacattcttccaactcttttctgtttctggcagggaaaagaaggtacaggggcttagcacaaacataaaagagtgttctgcagtttaagttgtattgcagggaagaatctgatgtacaatctttacagtggacttcagtagagaaggagaaaatgaaagaatgttgaaggaacatgtatcttttgtagccgaggggcagtgcagaaggagccaaagaagaaatgggatcctgctgtggccagtcaccatactgatggtttgcaagtgttcaaaactgttagaaagtgcagctacttctgtttcccatagtcacagaaacagcttcgacaaagtgaatacactattcatgcctgggatggaaaaaaagcaccccgtaacctacacagaggcctttttctctttcattggaaaaacaatggctttattttctggaactgtagatgtgttgcagattgaaactgcttgaattgcagggctgtggtagtgaagtcaggggagacaaccaagttcagattaattcatgattaaagctgagagtaatttagagtaacagtacctaattgcttacagtttaagccagtgggccctcaaactttaggagaaatcagaatcactttgttaagagtatagactgttgggccctagccaagaggttctacttaagcagggctggggagagactggagaatttacttttctaataagtttcctgacaaggtgatgctgctgttgctagtacagagaccacacattgctaacttttggtttaaatactgctttgattactttaggtttccaggagcaatagctattggttaaaagagagcacaagcattcaccgtgatgttcttttaaatatccatcaagaatacaaagagtgaccagatatggagaggccacccaggactggagcaagctcagatcctcttgctgacctcttctagcattttttgctgaggggcatcctgggaccatgggccttgctctccaggtactgggataacagcagcattttgcatgtaccacaagcatttaaaatcaccactctgaaaccatatcacttataatctgtgaccttccattgaaaggatgtttccaaataccaggcactcctgatttcagaagcaaactcagcatcagtaagcccacgttctcactgaggaacacagagtgctcaggtgtgcctgtttggtgtatctgtctccatttctccatctttccgagaaacctgtttcactgcaagtacatgtccagtttcagtatagagattaatagcctgattaaaattgatgtttatctgttttagggttgcatttttaaaaaatggaatccagttaaccacctctatggttcttttacccacaagctgtgaccaagagctatttcttcacctgatggcaacaaaataatgactatgagcaaattactttgaaagatcatttaaggcctatgcttttgaacacagtcctgttgcacttgcaatagacattacaagtcagtttccccttcagatttcctaagcaagggaaagagagaatgcctccttctctactctgtggttgaatgtgtgcagaacccagagtgtgagtcactacctcaagttggcagcctacctggttacagcaggactttacagaaaatccagtctgggaaagctgcctcatataagacaatgtagacaatgctttgcatttaaaatatgaaaatagtgcagaaggtagaaagattatagtaactctgaaagaaggtctgtgttgtgaaagcaagtcacaaaataaaggcaaagaatgctagtagcaagagaagatatatcaattatctaagcatgacatctcaaattaagtgttttttaaaaaaatgtagtaatgtaatattcttaagaactgtgtgctatgcctgaataggtccctgtctctctccctggtgtaataactgcatgtatgagatgtacaagtcattattgcacattgtctgggtgggagtgacactctattcataagctaggcactttaggatgtacatttattccaacagatgcttagactccatttagaacactggcactgtcatttatcaaatggccccctggtggtatcaaagagttaatgaggatctgaaatttcctaccaactgccccgcaggaaagacatctgactcccattcttcagtctagtagagcagttggcaccttctgacattcatgccaagtcatcctacccagagccctggattctcaccgacccagtcaccaggcattactgtctgcatccacactttacggagcatcgctgctgcccttcctcattcaccttcacttgtttggactctggattgattttatcatatgttcctgctatcataagtgcagccctggctccagggctggtctctgacttggcaaaaacttcttcaccctctgactgccttggcacgaccgtaagaaaacaaagcggattcacctctaggacttacaatcataatccttaatgaaaaaaagtaaacttttaaataaaatgctaatacaatggctaatgcagtgacatgaataattacaaatacaaaacaaaattcctgacatttaatttaaaatgttggtgtggatgggtgtattatctattgcatctttatgaagctacatgaaggtaaacttcttgggcagtagagttatctctatatttatcaaatgacagaaaattgcaatacaaacttatgctagtattatgcattttttaaaaagcagaatatctttaacaatgtcattaagaatgtgttcttggccacttgtggtggctcatgcctgtaattccagcacttcgggaggctgaggcgggtggaccacttgagcccagaactttgagaccagcctgggcaacatggtgaaaccctgtttctactaaaaatacaaaaattagctgagcattgtggtgcacgcctgtaatcccagctcctcaggaggctgaggcaggagaatcatttgaacctgtggggcagaggttgcagtgagccgagattgtgccattgcactccagcctgggcgacaagagcgaaactctgtccaaaaaaaaaaaagagagagagaatgtgttctcacatagagaccagttctggaattaagcaaataaaatagttggatttcatagtacaacatgccagttggaaaacagtttagggattcaactctgaaaaaattaagagagtctttgttgttctccttttccagatatatctatacctgagaatatacgacataacttatatagcaaaccttctatagaaaggaacttaatggaaaacataaatggatggagtagcaaaaagcaacttgcactttctattttactagaatgaaataatttttaccaagtcaccattatcagataatatccatatattttttggagagcatttttcgtatttctgcaggcttgttatttgtcactggcaaataagaagctactttctcctgttgctgagttttagatgtttatattttaaacctgtgttatttgtcatgctctatggggttttaacatttaaaaaaataaattagcggctgtggaacattaacctgtacctatggatgctggtactgatgaaggcaacagtcacctaagaattgtggagtccctgtcgtctgtcggggcagcaaagataaaaagctttaagataccataaatttataacatggaagctgaggaggagtttcttactgtttctttatgtgttgccttgtttgctgggccataattataaactgattacagctacaggaaaaaaaaatgcctttgttgttctttccacagaatagtaattactctgtattgtgcttcattgtgtgtttttttttggttagtcttttgaacattattagtgtatcttggatttcagtatggcttctggcaagcaggaaatgcaaaataagtgtaatatacataagatgtttatagtgattatcttattgcatgttatgtatcatactgtagacaaattaagtctatgctaagaaaaaccatcttgctttcctgtctatagtcatttgtgatatgtttgatatggtctttgctatttgctctatttctcctttctcttccttgataatatagaggtagctcagaaaaagtcatatcaaagttagaatgccatatgttataagatttcaaatacactctgagcaatatgaaaaatctattctctgtgaaaatagcttatctttcattaaggctgaatttacatcagctgaagacaaaacaatggacctttttttttttctgtctctgaggtttttttttttttaactgaccagatctacctctaattgctttctcataggcacaatctgtgaactcaactcctagagtctaggtctaattaaacgctctcgtggtttgctgctaattgtatgttcaactataaagttatgatagagtccatttgtagaggaaacagaattcattcttcatgtcatttaacacaattgtattttattttaccatttcaaaagatgggggaagaatcacattctagggcataggagatatttgagtgactctgaaaaaaagaaaatataaagaagatgtagtataagtaggatgggaggtgttaaaaagcacatacaattttgagtgaacaaggcataaatgttaaagatatctgaaagggttttttttttttttgagatggagtcttgctctgatacccaggctaaagtgcagtggtatactctcggctcactgcaaccttcacttgctgggttcaagcaattctcctgtctcagcctctcgagtagctgggtttacaggtgcccaccaccaggcccagctaatttttgtatttttattagagatggggttttgacatgttggctagactggtctcaaaatcctgacctcaggtaatcctccctccttggcctcccaaagtgctgggattacaagcatgagccatcgcaccggccagattgttttaatgatagaaatctacatttttcaggtaactcatcatttttgttggatttcatcaaagattcactgaggaaaataaaggagttgcattttttaatgtggtactttcaaatagaaataattagatggagattttcccctttagccatttgtgatatatttaatttttaggtgatattttttgtctaagagaatgaaacggatcacaaacggaaagttttaggaatttctctgaatattagtgaaattaactaaaaattacatttcagtagaatttaccctagttaatgaattttcatattgaggcatgatgatctacaaatatgtaagatgatattgaatatccagaaatagaaataaaaaaaagatatcgaccacagcaagtcagggcaagagaaggttatgaagaagtaagaaagaacagaaacataacagcaaataaataaataaaatgggatgctatttggaaaagtgatcaaggagaatagaaaatactttgtaaatataataggaaaagaggaagtttgagaatgttttctcataggttgagaaagaattgatttaataatatttttcacatgtattttataatagaagatttgtacttttgaagaaagacttttcattaatagagtaatacatagcaagttgttttaagggtaaatgagttttcatatttaatttcaaatgactagtatcaaaaggaaagtaggcctttgctactttgataacaaaagtaacactataggatttagttggaattattattactccctcccctctttttgttgactcccagaaatctgagaaaggggactttgggatagttgaaataaatggccatctaaatttgttgattgtcacacacatgaaacttgttggtgacataaattccagaagtgataacatgttgacaaaatgcactcagagtggtcacacccgggcattatcagtcattaatatttctgtgtgaagcagtttcttttgatggtattgggcacttgttgggcagagatgtggagaaagaaggatggctatttagaggagataatgatctagaactgcaaaagcaagaagcactggagactaatttagcctccctcattactaggttagatgtgtactacacatgggtgcagaaaagagccagcattgtgacccagaaaaacatttgcaaaatgaaaacaatatgatgctgaaaataactctgtgaacttaactaagagtaaaacagtcatacagttcagaaacgctttgtcagattaatcagatcttctaaattagattggcacatccagctgatggacaaaaagttcatacatggtaactataataacttttgagaacttttgaatttgtcttattaatttataatattattggagtataagaatatagagtagaacaactagttcttattaaggaacatgataggttatagaattgtactaaaaataaaggacaaggggatgccatgaggtggcctgtacaggtaggacataaatctacttataactttttgtaacatggcagtggaaatgacccctcactgcaggaatggcagacatagaaggttgggatagaggacactcacattttttgagatgttaccatgtgcactggaaataaaatgatgaatgaaaataaacatgatccctgcccttgtgaaccattaacaaaattgtcttaaaattagataggaaagcaagatgaatttagaaacaacaaataacagaatacctttaaaggcttttattttttccttgtttattttgtaaacagtaattggttcattaaaaagttcgttaatttggtgagtaggtgaaactagaaaagaggtactcaggtaaataggtattttaaagtcaaatgtaaaaattttgaatcttaagtgacttgtgtcctgtgaaaaggggcacaagaaaactagaaattgtagtttttatttgattgattccttacaacactttgaagtaggaggtcattattctctctttcacaacagatggagacagtgaaagcaaaagaggttgttatttgccatagataacagagttataagaggagagatttctcttataaattttatggttttcctagtgctccagaaaacctcaaaagactggtaaaattaaaagtcaaaatgtggtggagtatgtttagtgtccttgggtttagacacaaggagatcatagttatatatcatataagattgtgtccagctaaaagtaacagagagtggaaataacatttgtttaaatgagataaaacctcatttttgtgtctggtaaaatctagaggaggtggtgcaggaagggtgcagcggcactgctttacccaggctgtagtgacctaggctccttctagtttattactctgctatctccacgttgtggctctaattcctcctggttccaggtgacaggtagagctccagtgatttcatctgccatttaggtggcaggatggagaacaggatgaaaaaggataaagaagcgaaagacctgggtcttaaaagacccgggtcttttaagaaaggttcctaaaaattaccatactgtacatttgcctacatcctattggcagcagctaaatttggctgcaaaggaggctggaaaaataaagtctttattctgaccaagtcatgccttcctaaaaatcgtgggttctaataccatgtaagaagtggtgaattggtatgaagtacaactaatggtgtctgcctaggtagcattggtgtgtggttgggatagaagtcaaattgcagcagccaagatgtgcattgcaataaggaagtagaagcataaaggctcttctaaagagcttgaccgaaagagggtgttttaccagattactccaatacccgagtctgtcttgttcctaaaagtattggaagactattagaaaactcacatattagaaaatgacacattaagccaggcacagtggcattcacctatagtcttagttacttgagaggctgaggcaagaggattgcttgagcccaggagtccacggctgtggtgtgctatgatcatgcctgtgagtagctactacactccagcctggaaaagtcacctcatatagaagctgaacgcaagcttgtgataaaaagtcaaaggccaaatggttactatgtgcttacagtactagtgttagttgaaactggtctttcctaggatctggtaacacgtttatatcttcatctaaattcattacactgtacgtgggcatgttctttattgtttagacctgagctgtaataaaaagagttagatcactttgaatagacaggcagagttgggattcttggcttatcacttactaaatctataataatgggcaggttatttaacctgagcttcagttttcctaaaaaacggtaataataatacttgcctcatagagtgattacaagcattatgtaacaatctgtccaacttgtctagcatggtggtaggctcataatagatcccaataaatggttaggtcttcccctttcagcttctgtgaagaaggctatttaggaacgtgtgtacatttgtgccattatgtttaaatgttctctttatcatacctgttttctctccaagtccttggtgccagtaccataatttggggagcaaaaataaatcactgagaaaagcagatttgttagaaataagtttaaagtgcatctcaggctatgattttcacattggttctaaatttatcaaatttctatttataatttttctcacaaaatatgttttgatattcaaagcatgcaacgaaagtttaaagatgaaaatatttttaattctttttttgcatgtgcatgcattgaaagtttaaagatgaaactgttttcaatttttttttgtttttgtacacaagggtaataatgagagatttaataggtcatgcattatctctcaaggtgaaaccagggtttgttccttagtgattcagttcttactgggccaaaattccacttcagttttggaatgttttccaggtcctgatgcagcccactaaagctcacacaaaccatgtgctataattagcttatatgtaatgttgaaggacatcacattttatattagattattttcttttaaaggaaagatgtgttaaattcactcccttcttattgtaaggtaggtttgtagtcaaaagccacagtttttgatctgaggctatagatgaggtctgcctaatgaacactgatgttttattgattgtataggaagtgttgaaatatagccacaggttcctgatttatgaggggtttgaaatgagctgtcatgtgagcacttacctcatcttggatctgttgtaccaacattgtctaatatagttagtctcagatgatctatttcctctattatggaaattatcctgccagtccatgtgaagagaaacaaaaagcagacaccccataccaactctaccttttatgtatatttatttgaacatttgcagtgttcaatttgttactatttgcaatgaacttgatttctacatgttttctttattttggaaatacactgtttgtgaccaaccacattgattttattatcactaataggccatggcctatatgaagcttagaaaaaagcaggtagggctaggtgcagtggctcactaaatatatgccttcagaaatagaaggtatagatttagtttgtttgacaatgttttccttactgtactttactgtatctcataatagtttcctagagtggctcttcacagaatattaaagcaaaaagatttatggagagctaattgggattatcttacttatacatccttcttgagaaagaaattcaggttaggttggtttaacaacattgatattaacctaagatgtatttgggtaccagattagccccagcaggagctcagagaagttagatccggccccagtcttccatagggattttagatcattgggggagaaaataatacctggaaacaagctgtaaataaaaatgatgactggaagatgaatcctgcttattcattaaacacagtctgcagcctctgtgtttactgattcctggtgaggacttggagcgagtatacagtttgcatccctgaagatgtctgatagaagcagaggctgattgaattaattggaaggcagcaagggaggtcatcttgtctggtccctgtccctatgaagaatggcacagaaactctcccagacagattgcgacctgctttaatcagccactggcactatacctatgcctgtgctgtgacccctaaaattgggaagaaaagtgaaagacctagtcagtcatccagaggattgactgcattgtacagaggcaagaattgttttcatttttcatttgggtggtccaataatacacacagacaccctaaaattttcacttaaaggatatgcatcataaacttcaggcacttatgggcctttatttacaaatttaagtttctgttataaaatcgtttgtgtttagatttttttggttttcaaaaccaaaagctgtggttctttgttgttggttttcactgatagtttccctttggagtaagagagaacctgcccattactcatactttcttgttattcatttattttcatacttcattattccttcaatgcttttaattcctcatgggcaaactcattcagtgatttccttaagttttagttatcctcaatagaacttaattacaatgggagagaaaatgaagctgaaaagagacatgatataaaacaagagtcatggaattaagtgattagggttctattcctggctgtgcctcttcacaggttatcagacctggaaaaaaatcactcagttcctctgtctcagtttcacctttgtggaatactagaattggactaggttaatgagtttcaaatttttttttacttcactccagattaataatatattgtttatggcaatacagtatacaaacccacctctcaactgaaataaagactcaagaaacaatacttcctgttactatttgcaatgaacttgatttctacatgttttctttattttggaaatacgctgtgtgtgaccaactacattgattttattatcactaataggtcatgatagcttagaaaaaagcagatatggctgggtgcagtggctcatgcctataattccaacactgagaggccaagatgggaagattgcttgaggccaggagtttaaaaccagcctgggaaatatgaggagaccccatctctacaaaaaatttaaaaattagctggtcgtggtggctcatgcccatggtccattctacttgggaggctgaaataggatgatgtcctgagcccaggaggtcaaggctacagtgagccttgatcacaccactgcactccagtctgggtgacagagtgagaccctgtctcaaaataaacaaataaataaataaaattttttagaaaaagcagataggatgagattattttaacataagcatttctattaattacaggtttaaggtgttataacatgtgttcccgtgataatacttcattgttgacaaaatcttaaaaagataatggaaaggggaaatgttttacttttctatgtttatatttaaagcaggtcatcacattgactattcagctttttgtttaaaagggaatacctgagagagtactattagtaacttgcaaatagaatgattgaagtcagtgttgaatgatgacacattcttgaaaacaattctgatgccatctctttctctgttcctgggttggaatttataacctagggagattgtaagtaataaaaataatgataacgcagtgttggaaccttgaacttggacatatcctacaaataaggcaggttacattctcagagtggcaagtgagtatacaatttttaggaggtgcaggctagtgggattcccctgacctgtcataacaggaacaaactcactatgttgaccatgcattaggtaaatgtgcagttatctggctggcaggacatgctatttctgtcctagacactgttgcccatctaattgagcagcactggcatctgtccagatacttaagccgagaacctagaagtcacccttgggtaccactctttgctatggtgcccatatccaaatcctgttgtttttaatcctgttttgtctctagtgcaatcacatttcttcactttcatcaccaccttagcccatgacaccgtatgctcctttctgaactataaaatcacctcccaatctgcctactccatttactctttcctccttcctatctgttctcttgactcagtgctcttttagaactggaaatctggttatgttaccttttgatggcttccctctgcttttacagaaagaagacagatagactcccggtcatttgcattgttccataatctggccctgcccccgtcaggcctcacctgtgcctccctccttcttcccctgctaagcctcactggctgagcctcactccttgtactcttctgctgcccccatcaatgggcttttgccactgctgtcatcctgtgctcccctctacttcccttgcccacctaattcactcccatttatctttcagatcgtagtcccagtgtcactctgtgacagcaaggagtaggtcagtttttgtttaccattgtatcctcctcactgcttagtatatcacacaagctcagtgaatgataataataaagataataataatatcatcttatgtagtgcctattcttttcaacactcttctgactgcctaatgtatatactaactcatttaattgtctaatatatatactaactcatttaattatgacaacaaccctatgggggagatattattgttatccccattttacagataaggtgcataggaggttaaagggcttactcaaagctcataactagtaaatggtggtattgagatttgaacctaggcagatcggaagcagggtggttggtctcaatcacagaactaaattacctttctcatgcttagtaattgaatatatgaatatatactgagtttaactttctgttgtaatctctttcatttgtataattgaaaaagtgttgtatgttatagaaggttaagtattttatagcctcacatatcaaatagtgatgttcatttatttactacataaggtgccagatgccttacattgtctcatttaatcctcacagcagccatgcaacataggtcataaattcctattttatgagtgaagaattcagagacttggaggcagagcctaaaatcttaatctggtctcaaaacccatgctattttatatttttccgtgttgtgtagaagaggtaggacttaatctgggcttgctaggatgtgtagaatttaaatgagagaaaaacgttgagtattaaaaataaatagaaatttataaattataccagttaatgaaaataaatcattttataaagctacaaaacataaaatattgaagaattaacttaaaaataaatgtgcaagtgacatatctttattaaggattcctaaagaagatttgaataaacagactctatgttagcaaatggaggcttagtattgtagctatgttatgtctttcataattaattttaaaaattgatatgactaataaaagttctaactttttgaactggtttaattagttataaagactattagactaatcagaaatttttcaaaagagtatgatagagtacagaatgaaccaatggtataacataaacacataataatcataaaaatgtagcattggcatattaagagaaaaatggcctagggcagaaaatccagagaggtgttcaagaatatataaaaatctgatatgttaaaaataatgttatataaattatttgggaaatgaatatacatgtaataaataacactgggagaattggttcacaatttggaaaatgaaaaacttatgatccttatctcaacccaaatatcacattgaatataacaaaagaattaattgcaaaaatattaatctgttgaatgattaaatattagataagaatcttaatgaaagattaaggacaagataaaaaaccatgcttttctataatataggggaattctcattatagatgaagtgaatagagcatattaaaaagagtatatcactttaatgtttaaaaataaagaggcaaagaaagaaatgtaagacgccacaccaatatacaaatggtcattaagctgggaggctaatagatttttttttattttcttctttctacacttttattttccatatttctagtattaatatgtattacttttgtaatttaaaaaatagactgtatttttaaaaggtaaatcctgagccaagtcatagggtctgaaatgactgtaacatattgggggtgggggtagcattagaagtcctttctgctgaagtgggaatttccaggcccaaatttgaattgtatgaggaggagtgtctttaatatgccttaaaaaagagaaacattaactatgatatatcaagttttataaattattttaaatcaaaatttgtctctcatgtgtatgatctaagataattatgtagaaaaatgcaaataattgaatttaatcaaacaggcttttctttgttcagggacttagggatatatctatgaaataatttgcttttctgaaagtctttcttttaaactggttgttttgcctgaagatacactcttaatcttatttgccacttaccttaggtttttcagtgttttcgaaactctagggcattgcatggaaatttttaatacctgaaggggacacctggcacctgcctgaagcactttctatttcctgccaggcacaaaggagagatgttattgtgaactgatctagagctcttcagtggttgatttacaagtgtctcctcatgtgtcctcaggcagctaagagccttcagttcttgctgctacatttaaattacagaagaagatagcaggtgattttcagcaaaggacccttgtcttctaattttctctgccctttgtaaatagataaggtagtggctcaaattacttcattagtccaatacatctgtctctacaggtccttgacagagccagctgaagaatccacaaagcagaaccttgggtgtgaaattctcttttgagtttgatgttatattttaagaaaaatcatataaaggcatagactcagacacaccaccttccaagactaaaatactttagtcatttttataaagataaatgtataagctttattagcgttggtctttatcacaaatgtccagtccttttgcttgggaatttcagccattttatgacaacttttccataagtggatggctgaaattcataagaagttttttttgtttgtttaacagttcagaaaaatgcttaaaatgttatagaaacttttttcctttttaagtgtagttcaatataagtattggcatttctgttagtatttgttaatacttattgtcagtatttctgtaaaagtttatattttataatattttttgactcctactacactattgtctttaaagattaacacaagtgcatgaacacattacatgtagagaacctgcatttacagttaatttaagagacaagctaatcattggtctggtgggtgtaagtaaaaggggaatttggagaagcaaaagataaacctgaactggaagaatcaaaggaaatttcacagaggagaaggaatagcggtaatggcagaggttttgagtcacgtagacctgattttaaattgccgtttactgccattactttgcaatgttgggtaagttatttgactttttgaatctcagttcttctatttgtacaagaggagtagtaataatttagaattaaagggatactatttgtgaagtactcttaccattttaattatttgtatcctccctcttccctttcacttctctgaccttattttccataattgattcatttagccagcatatcagaaaaagaagagacctaaaatcttctcttttttgaggaaccagatttgttcaatggctctaagtctaagaataatggaaatatggtgacacagtgaaccaaaactctgaatgcgggaaaaaattaatccaggttgacatttggtatttttgttagtgcagaatttccaggtctcagcagtagcccagttacaggatacttcatactgttgtggagaattgggtttagtggtatttgttctgtcacacttacttgaagattacttaaataatcttcaagggatcttagaaagtataaggaggaagcagttagaaataagagaacatgccttagaatccagaatttcagagctggaggggccctgacagagcatcttgttcagttctctaatttttactgagaagtaaccaaaagccagagagatcatgttttgcccaaggccacaaagttaattggttgtggtgttagaaccagaatgcaagtctggcttctcaggccgttggttttactgcaacattgcataaggtgctctactccaacgtagcttctttgattatgccagtgttgcaaataaatgatcaaccacgttattggtatgtgattactctaaacatttgggccttttattcttttaataattaaacatctatataaagtctatactctgttagaggatataataaatagcacagaacattaaaaatcagtccttttaattgaggtcttgatgcccttggggagatatcattaaccaaatcttcacctgatttttcaaactgttcatggtgccaattttctactacctagcatcagaaccctgagttgttcattgcctcctgacatttactgccatatttaatcagatagttagattctgtcaatttggcctctaaaacatattttctctcattcctttgttttcacttccctgggttatcctgtttccactttctgcataacctgcctcccaacttatctctaccttcaacctatgcttgcttcaattgattttacacattattctcagcaataattttaaatattgatcatagttctccatttcaagtgaacaatattcagtatttaagcctagtatttaagatgctcgatgatctaatctaggcgaagtttgggaagaaaatcattaaatattaacaaatttgaggtgacatctcccctgaggcttggaaacatctaggcaaggaatgaagagagtgaacagctgaataaaggcctgcatttggagatcttatgtaatattcaaggacctaagagtggagcagagaggtgtgtggtgcagcagatgaagctggagggatgaggaaccccattacagaggtccctaagagtggcaatgccagctgaaggcccaggattagtgacatggttcaggaaggtgtccaaggccactcgccttctaagctgtccagctgggacctggatccagatctacctgactgatcctctctctcccctagccagctgcttctatcagtcagtttgcctttctgtctcatctcagggttcatattttcatctgtcttcagtatgggaggtgcacactttcatgtgtggatcctagtgctctggagatattcctgtataattgaacatgcttgtatttctaccttatgttccccctattgtatcctggaacccaaatcagtttaaatttagtaaaaaaaaaaaaaaaaaaaaaaaaaaaaacctatttgtcagcttgatagcgctcactctttagtgtgtgatgtggttcttggcatggttctcatggatttaaaagtcactgcactatgcagtaacaatatatctgtgtcacattgggaaaagcacaatgtaaagcatgacagtcttattcctggttatcaataggcagagaagctcctgtgaaattcagaatgacttctaaatctgggcctagatgcataaatgtatttattcatagcaggttcacaaattcccttcttcctctaccattctctccagagcaactccaagaaactgacttaattatttaaaatagttgcttcataattcagaaaaattcagggagaaactttaaaaaatacttcttaatctacaaatttagattgtgggattatttatactccaagctgagatggttgtaagaaaaaggcaaccaattggatgtttgatttccccagaattaagcaactggtatgacttccatttgttttttacttgaattgaccaactgcttattggaccatcattgcattgatattagaagttttatatgcctaatttcaggacaattaaattagtcctctgacattttaacttaaaaaactgaactttatcctgagaaatgggaaattcttagaaagcaatgctttgcaaccacaatgcatcaaagtctgaaatttctcttaggctcaccttaggaacttacattgtaacatatacaatgttttgccaacttaagtcaatttgccttttttactgaaaaggaacaaaacccaagaatatataccacaaagtgtgaaagaccttaactaaagtatgtgtgatatttcttagaccagtaagaatttattattttccaggaacttgagatccagtcacaagatttagatttcattaatgaagatgtaaaacaatcttcccataaaatttaggaggctgacttcctctctcaccatgaaaacactttgctatatgttgttaattttaagctatacactaaaacacatcacaactttacaatcggtgatatttaaaatggttagctgacataaagcctttgacgatatttagcactttatagcaatacgttaacactaactttagaaactatagcataatgaaattttacagccaattaggttgatgagtcactgtcagcttcctaaactcctcttttagatgaatgagagaatcaaatataggaagtgaggagcaaattctagctgctgtaaaatcttaagtgtcatcatgaggttgaagtgttaaggaacagaaaaatacattgtctaaacagcctgaaaagaaatcaaatgatccacttttaagtttagaaatggtaatagtattcagtctttcagtttgtcaccatatgcttatgttgatttatggggagattcttacagtgttcattgattcacatgtggcaccagttactaggcagacttctgaactctttaaaagaacaaaaatgtacaaagttgaatatgtttaatcaacagtcaaaataattggagtttataactagaaaagaaaatgaataatttgaatagtacaattttaaatatgtttctttaataagattatgtgtatttgattgttcatttagacctattggatataaagttgaatttttagttttattttttggtagggacagggtctcactctgctgcccaggctggtcttgaactcctgacatcaagcaatcctcccacctcagcctttcgaaatgttgggattacagctgtgagccaccacaccaggctgtttattttttaagaaatgctgaggaagagtatatgtattaaattggagcatgtcgattataatttatcaggaaattattgaatgctgaggagtatctttataaattgacagggagtttgcactggcattaaaatacaatgataatatataaaataaaatgataatatattaaattgaggttgcactggcactaaaatgataatatattaaatcaagaacattttaggatagagtaagtttgaaactataaaacattcacacatgtctagctgttacatgaattccatgggttgtaaaaaatttccaaattccttaatgctcttgtggtcattgcttcatttgaagccatttggcttaggcattttctgccagttctgtgtccactctccacccttcaccaccctgcagtaatggaaacatggaagtcctcccttttctttaaagcccacaaaataaaaaataattagattaaaaacaaataatatttacagaagaggtatgtgaggggtgtgtgtgtgtgtttgtatgtgtctgcagcagagttgtttagagagcagcaatacaaacaacctggaacgttagatttccctctgccattattgtaccttgggctcaagcctttctctgtgttgctgcatcctcctttccctcctctctgtatctttttcttcctactgctttctattttctgtttccaccctctcaggaggaacacattcaattcctgcttattgggccatcattgcattgatgttagaagttttatatgcctaatttcaggacaattaaattagccctctgacattttaacttagaaaactgaactctatcctgagaaatgggaaattctttcttatttgcagatctttcgtgtctttctggcttctacccttgtcatcagctccaggcctccctgtgtgtctaaggacatggtggaagctttgaaatgcgtaaatattgggaattgtgttctttgactcttcatctagtgagaaaaggggaagaatttgattagattttcttcggggtgtgcatatcatgaaagaattatttttattttcatacttcaataccataaaattctctaaacaatagatctatagtggtatttttgaggattgctgtatggaagagcagaaatttcctaaagctggcccacagactcagctggttgcaccagaatctcttggcgagttgttgaaatgacagatccttcatgtcccaagtagggagattctgacccagcaagtctggggtggtgctgagaaatctgtacttaaggagagacccaagtgtggaaacaactgccctgaacctcactgtctttattttccgttatcaagttcagcgatgcaaaataaatgaaacacagggatatccatccagacctagggactgatcctcaaagttgttattcagtcttctctctgaaatttcctcgtcacttgcctctttgttcataagcaaccatcctggttttccgggggctcttcaggttttggtcctaggtcctgagaagcccttcagtcctggactaaacaagaggggatagttaccagactagaatctatacggaaataacagcgtctatttggttgctgtaaccatccttcagtatttacttatgaatgatctactttgtggttaaagccatgggagagaaattttaggcagaagtggaaagggttgttttcacaggaaacttgatgaatgattctgggaacaagcagtgttgttctaagactcaggagacaaaagtataacctagggatagggagagaacatagtccccatgtcttgtggatcttagcttagatcatgcagctaaggggtaggttgaaggagacaatataacttttgagaagtaatcttccctgtctctttgtgctcgcaaacttgcaaaactttcagtaggatattttagggaatcccctgcagagatagccttgttttacatatattgtttgatatggaagcagcagactacgtagagatatggtaggccattggaaatatgggacgatagcagttagatggcaagaaaggtttagaaaactaattttccaaaaagctaacttccaaaatgaagtaaactgattattataaattgatctaatgttctggattctgtagtcaacattttatagtccgatttatatttctagactgtagaaattttagtagttgacaaaattgacaattagcagattctgaggttggggatgaagaaactcagccttggagaatgaaaagttgagacatgagaaaatcggaaaacctatgccaaacagggaggagcagaattcagcatcatgacagaccacagagaccagaataccaaccaagagcatctaaaagcacagagtgtcacaagtgattaagaccagaggaagaacaaaaacaataattcgatgaataaaaataaataaactgaccactatttttgtttagaaaaaaactagtttttcagagtgtaaatatacaaatataaaccacgttaattcgactctctaaatatgtaggttatatgcattgatgttcagaaaacaaatatttgttgaatttaaatacaatttattcaaggttagtaacatccatggaaagtttaaaatacttgcttttgtctaagtgttaccagttgtgtaagggttggtgagggatgtagaagtgacaggagatcattttttgttcccttaataaactcttgatgtccctttcataattttttcttgtatgcccaacattcttgccatctaccaaatttttctggggattgagagaatattgggcttgcagtctgagacctacgaatgcttcccacacctgccctatgtaccccatgtaccccatgtaattataatctccatgagtcttagtttcctcgctttcaaaatgataatgttggatcatagttgatctctcatttatatttcatttaaaatatatttcttttccatattaaattataaacaccaacctaaaagtaatctccagtgccaatgagcagccctaaatatgcccaaacacaggtacatttattctgaatgacattcattttgaggtatctacatctttttaacagaaattctaaatagaaaattgagttcaaaaagaaaacaaattgaatgattattataaagataaccagggtcacttaagggagtattgtcatataaaagttacaaaaaggctcccaaatggagcacattcaaaattagaactgatttggtaggtggtgaaagaccttactttgggccactaataaatgacactcctggagctgagacagatggcaagaatcacacactgcacattttacttaaaagatcaagccactaccaaaatgttatgtaattactagaatgcacaatataataggactcaataaggtggaaaaaagataatgaaactatacatcttttatttactttatatctttttgttgctaatgaaatagttttactctttccaaataaacttaatatccagtttaaaaacctgactcagtaagtatagaattaatcagaagtgaaatcaaatagtcgtgtctcattaagtgttcctcaaatgatggaaatcttagctctaatgctgtcttttattggaatctaacatcaactgatggtttttacttttttattttgcagggctggagcgaattgctcgggattcatcttatgaacaggaaggaaaggtccaatttgtaattgatgctgtatattccatggcttacgccctgcacaatatgcacaaagatctctgccctggatacattggcctttgtccacgaatgagtaccattgatgggaaagagctacttggttatattcgggctgtaaattttaatggtaagttacaacgtgtgtgtgtctaaatacattaaaagcgacagggtgtgtttttcctcctatatatagaagatacccaggcagagtggaaaacacaggattagaagcagttctcttctttgattagaagtgtgagtttttccacctgcttttgaatctcaaacatattttttatgctaccattaatctatgcgtgaaggaggcaaaagtttaaaataagcctctgtcaatcaaaatgttttacttaaatatcactattgaagagatcacttagaaggcttatttgaaaccattgacattagatttctttgaaaatgttttgttcatgtcattattagagaagagattgtagacattttgttttgaaactgattttaagcttttgaaacagtaggttgacttgaagaaaatggatgacttggagttgctgtatatttatactcaacgagtgttaagtttctgtgttttctgtttccttatatttttctcaatgactcagtccttcggaagcaaagggatgcacacaatgtaggcaggatttttatactgtaaaagcagaaatgttgtttctgtgactgccacgagaaactgatacagaatatactggattcacagtatttgattgaaaatagcccaactgcctgtctgaagtgatggaattattgaatgctgctgttctttcatgagagttgcaatggttgttgcccatgactttgatcattattttcaaatgaaatgatagaatgctctgagctgtctaatacttttggtttggctttaatccatacaatggacatgccttgagacacgcacagcactgcaccgtctatcataacacactccagtgacctcagttgccagcgtttctcagaaaagcacgaggtcatcttcaatttagaattcaagtggaaacttcttctttattttttttttttttgcatttttcctttaaaggcaacctaagacagaatttggtttaaattcaacacacatcgtctgtggcagaatatttgtgaaacattacataacattaatctttttgttgggaatatgaacactaacaggagtttgaaaataatttttatgcaattatgaaattgatcaaaagaggaatgttgcaatacaaggttgtttaccataacctgaggttggggaacacttcctttatctaatattgctagttaagaagtgggaagaataatgcagatgagtgaagtttccatagaactgaagctcacctccagaagacagggaagtcttttaaagaagcactaaagaaagcattttaaaggcaaattactaatttgtctttcatcttaaccatgatcaaaacctaacccttccttgatgacttcaattattataattattataccatcctgtaatataatgatactattaaagactgttaaagaatatcttaatgtaatggctattaaaaggatttgcctctagactccaataatctttgagttctgtccacttttttttttttttttttttttttacattatcaaagtgttgctgctgctgttgctgtgcttgtttttaggacaggtgctgacgatactttactggggaacatagacaaaacattcatggcacttcgagtttcctggagaacttaggtattaatcaaataagcacacaaaaatataattatgtaatctgcaatgagtgctgaaaagggagatattctggatttagagtttataatagtggacatttccctaatatagggatttaggaacagatgaaatctgaagggagtaggtgtctgagataagggtagggcaataggccaggccatgaataccatgtgaggtcttataggccattattaaggtttgttcttcatctcgaaagcaacaagaacctattggagcataatagaactgtgctgtgtctgatataaggcaacatatagctcagatgagggttatggaaaataaataaatcttagtatatgaacttaaaagacaatctctttgagctctttggagattgattttgctgggcttgagtcttggttgtgttccagtagctgataatacaggataagagacctgaagataagcaaatgatcatagaatacataattctgttgattttcagtgatttccaggatattcatcacattttaattttattattgacttatgtattcatgttcattctgtttatgataaaaatgacacacaaagctgttcaaataaaagtacaccatcaaaactactaaaggaggaagaaacaaatatggtaagcagaataaaggatgaaatcattaacttttgagcttcttaagcagtcaaagcataaagggaccgacaatgtgatttataattttcattatatgatagaagcaagcttacctatttttcaagagagaacacattttcttggaaattatttccaaaagaaaggtgtcatatgcgactttgacagccaaatgagcaatgttattttacaaaattttacagcaaaagcagaagtcttctctggctgttttgcatttgtacccacaatcaaagttaagaaatgatgtaactcttataacactgaaagtatagtatatttcattaaagatgtttccaaggaggaggaagataatcatccttgatttagatgtataactcttttgagccctgatgatacggggatgtaccatactctgaagaataaatgaagaacatctcccttatactctagttttaagactctatcttcaaaaatatcctactcagaaatctaacatttcaatctgttaaaaaacaagaactgttaagggattggcatagccctggctggtccacttccttagtcctgcttactggtctcggaagtaccttgaagagtcccagtggctctatgaagcacacatacaatctgcagacttacacacatatcattgctcttcgcagggatttaatagcagctggaagtagacttttggagcttgtgttagctgttaggaacctagaaaacagctatgttatgttgttaattggaaaccagttgagttgattatgttggtgatagccagtgttctcacctggtgggacagctgacccacctccctaacaccaaaagtgcaaggaggccattggccaaaacaaggtttgctcaggaccaatttttaattttctgaagaacccagatgtgcttgactagaaccagagctgcttactatacacgacaacaaaaaacattatatattagaaggtttttagcctagctattgccagttgtcaaagaatgagctttataaggcaactgccaagtttgtacagtgtggccttctagattgtctgccaggatcagtgagctacaaaaggtactctcaaggaattaaaaaaattgacccattagatggaattacttagtaatgcccatttaaaattgaatagtggctatcccaatgtttaatttttgtatagataaaattgttgttaaattagttctttttgacataattagatatcaggatacatttctttgtatgctcctttttagtttgggatagtaaaaccacgttatcggtgtggaggaagattctgcttccagtttataggagcagaaggtgaagtagccagagcactggaagctcatcagacagttggtacaaaaataaagagaactgtttgtttcttaaaatttaatctttctcacattgtaaccaggtatgtggtatgcttacttaagcaatggtttaaagatatgtaaaagattgtgcttcttccagtgtatcatttaattgacaaagcaaagaatatgttagaatttagagtgataaatgactagtatttcaggccagaattatttcattaaaaaataactaactaaagctggaatattcagtcaaactgctgaactgtagagtactaattggcatcaaagacataagctacaatggtggtttaattgaatgtaatcactgaaactgattttttaaaatcactgaaaaaaaggtacctgaaccatcttctgcatctgtattttaagcacattctgaatcacagtgtatccagaattactcatgttttccttacaagttttcttaacatcttctgtctacttgggaagccagaaggaaacaaagactttccttttagggttacttttattgctgctatctgaacaaaatgttatttctataatttttaaaccctaagatttatcaacaaatatagagaaaaggaggttagatattttaggaacttgtcaattccttactccagactgatctataggcaataaaatattaattctgtacatcttgtatagaatcaaagatttttctgttgctatgagaaccttatttatcataaagaaagtgttggatagaatttcagagctacctccctactcccttgccctatagctgagctcatatcagggcaggtcaagcacagtggcatattaatctgaattgtttgattgtatgtaaccaaccaacttgagaaaccaactaaaacttgcttaattaagctgaaattaagaatttgtgaatgtgcatcaggaaaccgcatagcgggaatagaaacgagtctaaagaaagaactggtcctaagaaataaaaacctataagaaaaaaaaagcatctctgtctttctgtctgtctgctttatctgtttctctttatattggttttctcttcttctaggttcacaggatagcagaggatctccatttccagggtttagctattctttaagacacttgttaaaactaacttttttttttaagtctcaatgtcagcttcttggaagcttgaatctcattagccaaacttaggttgtatgtcagatctgttccagattatcagtgtacaggaggaagtagtacaaacttggttgtcacagaccactccctatagaaaaaggtgacatttagaaagtttctgtaagtgccttatggggaaagcttaagcagggagttggaaacctgagagaggggtgatgtctaggtatctgaatctcattgcttctttaggtggatgagtttgtgttagcctgagggagacaggaatcaggaaggatctgtgataattggagagaagagtcaacttcagaattttgtaatgcaaacccttgtattggggttgaattatctgacaccaagaggaagaaagcagcttccctaaactcagcagtgagttgtgatctaaatatttcagtgctcaatattccaagaataatatggaaacgtttgttagattgtagagaccagtacatagatagaagttatcagcatcttctttcctttagaaaccttattgatttcaaagagttaatgcaaaatttccaaatatacaatttgagagtctctgaacactatagtctgattttgaaggaaatttgttagcataaaatacctttaagctatctgaaaggaataattatagtttaacattagaaaatatactacaatcatgctaataggtcaaataagacaataataaacatttcataagattgtgtaaagtcatatgataaaaatattagcctaatttatgttacaaatacaaaacaaaaaaactagaaatcgaacaaatatttaacatgataaagcacatctttctcagtctataacattttatatttatagttactcttatcaagagatggatcaaacctattgccactattattaatattctatcagttttaaccagtgtgataaacatgaaacaaaaatgacaaagattattactataagggaaaaattacttcatgatgattttcaaattatttgatctcgacaataattatattagaaagataaaatgtaacattaatattagaacattaagacttttctacatagtattaagaagtcattgttaatacatgggaactggaacgctttttttctttggcaaaaattatttaaaatattttggaataaattgaacctgtttgaagacaactttactgagagacatacaacatatttgaaaaaacggagagacatttcttgtttatggacagaagagctaagtatgggaaaaacattaattctttctgaataaatctgtattcaggcatgttataattccagtagaataactagggagtattttctggaattttaatagtattttaaattttaattatgagagtaaatgagcaaaaataactagagtgattttaaggaaaaatattcctaccaaacatttaacacttaagcataatgttaaactacaataatcaatccagtatgaaactaataccagaatagacatgtgataaactacaataatcaatccagtatgaaactagtaccaaaatagacatgtgataaatgaaaccaaatagaaatagtcagaaacatagaatgatgataaataagtaaataattctacaattgtgtgtgtgtgtgtgtgtgtgtgtatatatatatatatatatatatatatatatgaatttatcatatgataatggtggcttttagaactcactgggaaataacattttattgattaagagtttacagtagattcaactgagatgatttttccacataagaaagtattatccatttgaaatttattttagaattatgtgaaaaagaagcaaaagaataaaagaaaatgtaggcgaaggtttatttgatttgaatgggaaagtttaaaatcagtaaaagaaattattttaaaaaatgccatgtttgattctttaaaaatgtaacacttggatattacaaattatcatgaacataattcaaaaacggaaattataaggattcattgggggggtgttgtgtcaaaacatgaatatcctaaacattaaaagagccacatgaattgatataaactatgcaatctctaagaggtcaattgacaaaacttgtaaatgttaataaacatttgaaaaaaatgttaagtctcacttataatcaaagaaagtccaattcatcaatgagagactgttttccccttatcaaatttatgaagacttaaacatttatagttactaaaatgtattatattgatcagcattgtttttttggagatcatttgcttggtacatatcaaattcttattttcttatttctagaaaggtattctaagaaaattattaacagtaattatatttacagtaattcattgaaaaaaacaaatcacaatttcactttgtttttaactaaaacccaccaacaatatattgtatagtataaaatcactctagttatttttgctcatttactctcataattaaaatttaaaatactattaaaattccagaaaatactgcctagttatttctactgggattataacatgcctgaatacagatttattcagaaagaattaacgtttttcccatacttagctcttctgtccataaacaagaaatgtctttgttttttcaaatatgctgtatgactctcagtaaagttggcataacactatataatggtgttgactgtgtatttgggatcctaggtttttttcccctagttctgccatttttctgtgttgcgagcccatccaagcctctcaacttcatcttttaaatggaaagattatactaaaatgatctaatatttgagttctcttccaggtctgaattctctacataatcttttaaagtcaaaggcgttctttacaagaaaaaaaaaatagatgcctatcagtgttcttattgtctttctttagtttatgttcatgtttatctttcataaatcatttatttattttacatatattttattgattctcttctaaggtacctaatttttacaagagtgctgtgtcttttaaaattgagaatacacagattaagacaatgtggttctgtgagttgtcaaatttcatagcttaacagtggaggtacagaaacctgttactaacaataattcaatttgataagtgatatgatagaggcatgagcatttacaaacacagtataaggttgagattaagaaactacataagggaagcttaaagattacaacacagagagcaagtgacatctaatttaagttacaaatagaaagtgacatttcttctggtggtcgagatgtggaaaaggtattcatgacagagaaggcagtttaataatagcttgaagacagggaagagcattcacattctaagaaagttgagcatccactgtggaagaatgtaacacagtggttgtgggggcagtcaggtgatgagacagtaagatgagcttggtcctggttagaaacctgtgccgagtttggctttgaatttgacacagcagggaaaaaggaatggagctttttgagcaggacagtgaagtgctagggtaagtgttttagaaaagaaactatggcagcaatttgaaaactgaagcaactgagattaaaggcagcgatggtatgtttaagagatagttccagtagtcacaatgagaaaatagtatctaaaataggaaagtaaaggtacatgtgaaatggaaagaagtcaaagatagaggaaggaaatacagaattatttgaatgatgactctgttctaggtactgtgctttgactagaaaccaaagaagtatcttaacttccccaatgatctctctttataactgtttgtgacaacctcattactggagataattcagtattttagtatatatactattgatatatcaacttgacactactttctatttcatctactttttttttttttaattttttaagagatagagtctcgctttgtcacccaggctggagtgcagtggtgcgatctccgctcactgcaacctccgcctcctgagttcaagcaattctctttcctcagcgtccccagtggctgggactacaggtgcatgccgccaagccggctaattttttttgtattttagtagagacggggtttcaccacgttgcctaggctggtctcaaactcctgagctcaggcaatctgcccaccttggcctaccaaagtgctaggattgcaggcgtgaatcatcgagcccgccctcatctacttttataagtagaaaatgagacagaaattcattatatggaaaaattgacataaaacatcatctcttgaagttatggtgcataatttccttatgattaaatttacttgtctagtaaatgaaataaagtcaaatatgattgattatctgttgatctaaaaataatatcctttaataattgtctcattagaaatacaattgaggaaattaataatttggaaatatgtaattcttgaagtctctgcttattgctatataatcaatattactgtatatacattcactttttaaaaatttataaatatttttagaaatgaataggtcaattcacaagtaatttttttgtttctgatgaaggaaacatcaagctagctgtaaagtattaatcttacccattaaatcaccatgaaatttagcactgtaattctacctgcctctgttttctaaccgagtgaggtgttaaactgtggggttttcaaagtctgatttcttttatagttttgaaggacaaggtttatcaatctcttatttctcctttaaaatataaggacttacatgtgggccaagactgagccagcattgaagaaaagcttgaagcaaatcagtttttactctagctcttcctagagtcctactcaacttcatccattgtgttgggcttcttttactcattctttatttttgtaattcctggtcttcttcatcacatttgaaaaaaagcaggatgaatgataaatcctggagagaggtggagtaccatgggcttaataattgagggctgaccttgggtctaaactgggatgcagtaatgagccttgaatgaaaaatgaggaaacagatgtaggaacagagaagatttgaggtggtgggaaaaatttctgaaggagtttatgtctaatagtttgtattttttctagcgatcagaaacacaaattttatactcagtttgaatctagctttacaacattcaacaccttgtaatagtggccaagcaacaaaacctctatacatttttgtttcctcatttataaaaaaagctgataaggatatatatactaatctattttggtttcctatgaagtttaaatgtaaggtgatgatacatagacaatacttaaaaatatataaactgtacaatatatggagaatatttagactgcttgggtcatcttacaaaaatgatgagatgagtgggttgggactgagaacttgagaatctttagaaagatgcagacttagaaagtactacatataaggattagtttgggaggtgaaaacaaggcaggagttggaaaggatgcttctgccacagcaccaaccaacagggtattttcagcagtgccaggtccttggatataggaacagaaatgtgaatgtttttatgacattcttaaggtaaataggaaagtactttactgctgagatgggcatctaatgaatctagaatggaccaggtggggttcattctttcattatttcttcttgtttcttcaaaattatatattactttttttattgatggaacgtatttaatggaattgcgcccatgttattagggataattattttcttagcagtagcagtattttgcttcagaaagaatctactcaaaaattataatggagacttgattattttttctctttaaatctgttaacttttataattacattaaggtttaaacacaaaattagtttgaaagtgagggacaggggctgggcgctgtggcttatgcttgtaatcccagaatttgggaggccgaggtgggtggatcacttgaagtcaggagtttgagaccagcctggccaacatggtgaaaccccatctctactaaaaatacaaaaattagcccggcgtggtgatgcgcacctgtaatcccagctgctagggaggctgaggcaggagaatctcttgaacccaggaggtggaggttgcagtgagccaggatcccgccactgcacttcagcctgggtgacagagggagactctgtctcaaaaagaaaaagaaaaaaggaaaagaaagaaaaagtgagggacattaatgaaaaaattcctttaaattattgtgcctaattactatgcttaagggattttgattttcccagtcttttggatgtgtttaaaatgattataaaataacttttgactcatataaacaccttgtctctagctaagctaagtgaacaattactcaattttaatttaaaaaatctgtaagtatgtatttatggtatttaatgtgcatatgtcaaaaacattcatttaacattcattaaatgtctattgtgtgcccaaactgtgccatttgtattttttctctgttctctcacttcttttacttcatcttcctttatatcttaaaattctttttctctcctcttgtcctctttctccccagtatttctctgtttgcccttgtgatcactcagtaaccgagagagtagtaagaggctaggatcgtgaacttttcagagacagacatgagctcatatcctagctcttctactaatgttgtaagatcttggataagttatttatattttataagcctttatggcctcatctttggatggaaaaaataataatacctagctcatagctttattgtgagcatttaatgagataattcgtgcttaagaacttaacacgatgcctggcacagtgtaaatatgcaataaatggtaactattatttttttctgctcctgacaataaaccctcagtatatatttactgaatttcaagcatacacacataaaaactcaccaaatacatgcccatccacacaaattcctttacatgccttagatttcaaagcatctgataaatctcctgtaatcagtaatattgtgctatctgaatttaatttcttatttcttcaaggtgttattcatctattcccaaaaggtttagactttttagtttgccctttcttttttctcttgcagtcacctcctgaacccttgatttcttattagaaccttagggtaagatatgggagtaaaatgacctaaaacctatatgaatatatctggcctcaagtaaaaggataggatagataagaaggtggaggttgttggttgaaaaggtgttcagggaatgtgtactagaatataatacacctcctagcttaagagtctcttcagaaacttagtcgttgcctgggaaagagaccctctttcctttgcagagttaaactgttgccctttgatcacacgcaactcaatcagagaaaagtccttgtagcactgcccagctgactcagttgtccatgctcacagaacagagataagtggattctgcatgacagaactacttaaaagtcatatgccctatttatttaaaaaagtaattcaaatagaaatgaacattttggcaagtacaatttatactcaatcctgcttaagaaagctctaattttccccaggtcttgttcggcttttcgttgttgttaactttagagaaagtataaaatacatacagaagagtgcagtaaatctatagcttagtgaattttcataaattgaaagcaccccacacagaatccagaacaccaaaacaaacccccaaatcctcagctggcacctcaaaatcctcctgggttctctattcctcattacaccctcgccaagaagtcgctctcctaacttttgatagcacagactaggggttcttgcttttaaactttatataaataaaattgtataatctgtacttttaaatgtccggcttcatttcacagcaatttttaataaagataaaatatatttctaccattatctgtctctattaatgttagattcaattatttaaatttactttgttagacattcaatatttaatttttaaagctgaagaaattattttatgaaataacatttaatatctattaatgaggtttaaatttataaaggtttacattttagtacaatacccataatttttttgaaactggtaaagaaaatattaccttcatgaaccttctcgtcttggttttgttatcgtcattcttttaaataataaacttcattttgtagagcagttttaatctcacagcaaaattgagtggaatgtataggagtatccatagttctatgttgaggttcattctctgacctaaaagtcctctatcctccacctatctatattttcttcccacctcatctctgggaaccattgatcttttaactatctccacagttttgccttttccagatgtcttatagttggaattatacagtacatagctttttcagatttgcctctttcagttactgatatacgtttgggtttcctccatgtctttttatggcctgatagttcatttcatcttactattattgagttttaagggctctttgtatattttgatatagttgtcctttatcagttgtgtcttttgcaaatattttctcccagtctgtggcttgtcttctccttctcttgaatgtatcttttctagagcagaagtttttcattttaatgaagcccagcttatcaattctttctcttataaatagtgcctttggtactgtagctaaaaagcatccccatacccagtgtgatttagactttcttctatgttattatcgtctaatagttttaatagttttcccttttacatttaggtctatatgattcattttgagtttgtttgtttaaagagaataaggtctgtgcctagatttatttatattttttttgcatggggttgtccagttgttccagcactatttgttgaacccatccttttttttcacttagagatttgaggatgaaacttttgcccatactcaattgttcaaatgtcatgaaaagtgaagtcaagtgttctttgtagtcagaattgtgtgtgtatgtatcattgttgttgttatttttgtgattgttgggactgaaggaacataaatattgtctaaatgatgaaataaataaaaactaataaggttgaattgaagaattacccatggaaaatattactgcataggatttattggctggctgttgagcacctgattaatccatatgaatattaaatgtaattcctgaaatatttcatcttctaggaaacagcattcttacatctgtttcagtttcaattgacaccatcagaaaataatctaatcccgtcagtctctgtcctaggcactgaggagaaagaagaaaatcatactctcccagctaattctctagggtagttccaaagtactaaaaacatcagtataaggttaccaactttttctttctcttagcatgtaattgtttcattttaccagggaggaaaacacatttgcttttcttcacttagttgttaacgacagctgtcagagttgtcacacatactagagtcaataaattctagagtgctaaagagacatttgagaaaactgcagtgttcttgattgtacattgctcctttttctaaaaataagtgctttctgatttttctgtccccgtatttattctgaaatgacatcagccgtctgcaaaaaaaagcttttgactgacatttcagacattttttccaggtagtatttaaataagaattacttgggtatatctctctgatccttctagataaacttcagccaaaaccataaagagaattgacacttcttatacacagaaactatcttggggtgagggagaggaaaggcattttcactgttaaagactgcaattaactagtagatttaaatgagaaagtttttcttttcatcttaaacagtctatgtgcataggcacaaactatcagatattgtttaaaaaaatgagatttttattgcaatgtatgcataatactttctttttatacctttacgggttatgtgcttcatcagttttgcactatgtgaacctttcaaatgagctacaaagtttaaatgatactactttggacaatgatatgctaatatatgaataaacaaacaccattttgtgttggattttttttttctttttagcattattgaaaccatcttttggcttttgagcatgatagcaatgtgctttactggtactgaagcagaaaataaccagtccataaattttctagcagcctccagacacaaaatgtttatgaaaataaaatagcatattttgcaaactccagaatggtttcagctgaatagctttaagtcctaccacaggtctaactagaaagtgaatttataataacaacagcttttaagtttacaatggagtgtgtgcacataaacacacagctacctctctttatatagaaatagaagaaataaataaaaagaataaaatgatatatgtaaagaaaggatatgttttcttgccaatgtcaagataaatttttctaacttcatagagatattgagtaaaagtagattttgaattgcttcatatctttgaacagtgactgggataaaccaaatgacatttgagcttgtgttagcttttggctggcatttaccgaaaatgtttccagagccagttcactacctatattgttattattgtttttaatcttaagaattgaacaagaatcaaatatgctcagagtactgtggacaacatctatctactttactacattttaagagcatcataatttaggcatgatactgttgcagattaatgtaatgagctattttaaaactttagcgatttattgcaggtttttaaatactgcattctgaatggccccatgggaaaggtgtttaattgacatatacaagtttaggtattctatttgataacacaagggactatgccaacagattcaatctaacataaaaaattaaccctgtgcatttcaagcgttccttgaaataataatacctgattagcctatccatttctaatgtttggtttgaattaggaaaaaaaactgttaaatgccatatcattatccggcggtggttccctaagattttaagtatttctctttgtagacaagggaatatgaatacttaatcaccgtgattgaaaagtctttgcatagtttcctggcaaaggcaatgatatcacaaatacataaagattgatgcattccagtgtggattcagatcacttaaaatgtagattcggaggggtagaataaaatacactatatggcacttagaaaaataataaattgctttaaactgcctgcctattttgtattttttccctatcccatgtttgaataataaacattctttcagtatttgaggtggaaaataatctcatcatttgggatttatattcaaactaatgtatgtatatatataaagatgataagctcctaataagtacctcaggttttcttatttcaatactcagtggaaaatttctttgatgataaatttaaaatttaaccatattaaatcattttaactgttaatcatcttgaattttttcaaattacaataaaaatttcagaaatcttaatgcttttagttttaatatgtgtgtgtatgtgtgtatatacatttgtgtgtacatatatgtgtgtatatatgtgtgtgtatatatacgtatatacgtgtgtctatctatctatatatatatatgcctgtgtgtgcgtgcgtatattctgtcattagccctaattgtcctgtgtagtagagcaactaagagtgttattatgccatttgacaacagacatatatatataaaatttaaatatagactaagtaattcttcaaggtctcaaatcctggctctaccacttaactaggtaggtgaactagatatatgcttcactatatttaagactcacagatagtcaaggaattgggactagatccaaaattttcaattctatgttcaatgctccaagtatcaaaggagctaaaagaggacattgctctgacgatagccaattaaaattgctaaatctgcatccattcctcaagctagtcattgaacagattattaatcagtgcttactgtatactaggcattgttaggagctgaatgagcaaaccacaatccctgtcctcaggaggatgcagtttagtaacacatatacttaacaagcaactacaaaatgtaaagtatttccatgcagaaacaggatattgtcagaggaggagagtgggactaattaggtagggaagtcaaggaaagtgtcaccaagatagagatatttgaactgagtcctgatttgtgagaaggataagagcctaggaaaagctggtacaaaaacttttagacagaaaagagatttgtgtaaccatcatagtaaattctcttctgtcatgggagtcagagccctttgtgctaaaaagtatattatttcctgaagttctcaaagtatgatttgctctttagagttaaaatgacacatcatctagtaaacactttgtagaaacccatggaaatccttatggctattctcacagtgtttagggtccaggcatgtcttctacatgagtctgtactataccctactgtagttaggaagtactgatttttaaagtgtttccttgaagttcacactgtgaacatgacactactgaacactgaaaatattttgtcttgcaaatacctcctagattttaattgaagcttctggaaagtatagcatagcaaactacatcggataacaactagtcaaatgttaattaattttcatagtcatttttttttagagacttggtcttgctttgttgaccagactggagtgtggtggcttttcacaggcatactatagtgcactactgccttgaactcaagacttcatgtgattcttctgcctcagccttctgagtaactgagaatacaggcacatgccactgtgaccaccaatatagccattttaatgactgctgtaagcttttaatggaaagtaaatgctctccacttgatctcatcattgaattcctcccactccatgcaaggaggaagaggttgaattggatgggttagatttgaggtttaactctttgctgctgggtggagtcatcacctggctaaaaacaagtgagcaaggctcttgttggaggattccctaaaggaccagtgataatgaggtagtgagatgctctctctaagcagttcaggcctcctagcttttcttctaaggatgtgctttctcacatacagtggctgaccaaagatcactcttctggcctgagaaggcctggggcagattggtccagttcaactcaaaattaggccctgcttatataactgagtcacttttctaactgaaataggggcaaggagccctccctattgtctgttctagtttatgaattttcactatggagtttcaggccaaagtcatagctagtaataaagtgcaatggtgccttcctttgcctcttttgtgtgtatgtttccttggagacctccacaggaggaggattggctaagccaaggaaggacttgggtattcctagtttttctgtctaaataatgcaagttgcttacacagctccaattaatgcaagtcctctgaagagccccaaattaactttaagacaaggtaaatttaactacatgtacatacataacatgcacaaggcaaacacacacacaatagaaaaggtagtaataggtataagaaatatccttctgagaaataatgtttaaattgttctctccattgtaatacagagcagaaacttaagaatgcaacaatattttcttttttttcaaaaaagaagccatacaaaaaagaggcacagaaaatgactcttctgttgactattgatgttaagtaaaattcctagatttaaaatctcattttgtggccttatttagtcacattggttttctttcattctttctggaatttccaatggaaaatgtgagactgatacaagtgctaacatttattgagtccttatgatgtgtcaggtagatttctaggcattatttctatattatttaatcctcaaaataatataaagtagggataatttttatccttatttctgcagatgaggaaactgaagcatacatctagtacccatacaagttaagtggtgaagccaggatttgtgactttgaagaatcacttcacccttagttgtagtcctaattacagggtgattaaggtaattactatggtaattaaggtataccacctctaatgataactgcttttgtagaagcaggggaaaacttattagtgaaaaaaatatgtgtctaaaagagaaagcaaagaacctttataatttagacagaacactgggactaatagagtcagactagttctctctaagtgtgagattatgtgaagaaaagtgaaaacaggaactgaggagcaaaagccaaaaaaagagtcgttttaaagaattggaagacagtggctaaaacaaatatgaagtcaaggtaaatcttttgaaagtttattacagtcatatttgaggcttggatattaacattcatgacttttttgaggctgaggagtggacattaaggttctttccagcccattatttttttcttcgtcggcttaattgaggtaaaatatagacacggtaaaacccatcaatttcaagtgtacaatttgaggtttcatttttttaacaaatatatgcagtggtgtaaccaccactgcagttatgatttagaacatgtttattacctcaagtgttctctcctgtctctctgcagtgtcatgtcctgaatcccatttcttagaaatcactgatttgctttctatcagtagatttttttaatttaaaaaaggtaatatgaatggagttatatcttttgcagattttgtgttctttctcccacttagcacgaagtttttaaaatttacctgtgttgtgtctattggtagttcattcattgcccacctccctttttgcatatcacaatttgtgtattcattcattagttgatggacatttggattgtttccagttttccccgtgaagaataaagcttttatgaaagttcaagtacagctctttgtgaggatatatgcttttgtttctcttggctaaatacttgggaatagaagttcaagattctatggtaagaagacatttaactgtacgagagactgacaaactgttttctaaagtgaccataccattttgcatcactaacagcaatatatgacagtttcagttgctgtactcctctccaacacttgatattgtcatattgtcagtcattttaattttagctattttcgtgagtgtatagtcattactcactgtggctctaatttgcctttctctggtcactagttatcttgtgtatctttctataagcttattagccattcctatatcttctctgatcaagtatcttcaaatcttttgtctatttttaaaaactgaattatttacagcttccccttgaactgtaaaaatcttcattcattctgaaaatcagacctttattaattaaatatatgattatatatattttatataaaaatatgtaatatttgtttatatatttaacaaatatttttcttttcactttcataatggtatcttttgagaaacattttcaattctgatgaaggctaatttgtcaactttctaaaaatgaatcttacttgtctttcatagctaagaaatttgtgcctaactcaagcttatgaatttttttttcattgtttcttctcgaagttttatagttttagctcttatatttaagtctgtgatccttagaaaggtgattttatttcattatttttatttttttgagatggagtctcactctgtcacctaggctggagtgcagtggcatgatcttggcccactgcaacctctccctcccggttcaagcgattctcctgcctcagcctctggagtagctgggattacaggcaggcaccaggatgtctggctaatttttaaacattttttggttagagacgaggtttcatcatgttggccaggctggtctcgaactcctgacctcaagtgatccacccgccttggcctcccaaagtactgggattacaggtgtgaggtactgtggtacctagccagtgaagggtaattttaaaatatgataagaggtgaagcttgaggtttatcttaaaaatatcaatattaattgttctactaccagtatttgaaaagactgtctcccattgtattatatttatacttttgttgtaaatcagttgaatacatatgtgtaagtctatgtttggatttgctgtcttgttctaaaggtctatatgtgtatgcatattctaataccccactgactagattattatagttttatattaggaattgaaatcaaatagtgtaaattctctttgtttttctttttaaaaattactttggtattctatgccttttgcatctatgtatgaattttataatccgtttgtcaatttttacaaaaaaaaaaaaaaaaaaaaacccgacctgctctgattttagttggtattgcattgaatctatagatttggagagaattgacatcttacggttcagtcttcccatctatgaacattatctttccactatttagatgttttaaaatttatctccacaatgttttaaatttgcagcatgtaggtattccatatattttgttaaatttctctttatttcatatttttgatggtcttgtgagtgcaattatttaaaaaataaccatttctagtttggtaatggaaaaacttatttttgtatgttcactttgtgtccagcaatctttattaactcatattttttcagctgctttttggtagacaccttaggcctttcaacttaatcatattatctacaaatgaagatagttttattacttcctttccaatatgcctgatgtttaattcttcttcctaatttatgctactggttaggtcttccattacaatgttgaattgtactggaaaaacacaaactaagacatccttgtcttttttcttatcatagacagaaataattacattttttactattaagtatgatgtaccaatataggtaaatctagaaaacatgagtgatataagctagttgtagaatagtgtgataatatgacacaataaaataatataaaatatatgaacattaatacatactatatgtttttgtagatagaaacttatatgcaaagtgaatacaaatatacacaggaataataaataccgaggtagtgtttatctctggaaagcaaggaggcgatggagaagaattggactgaaggaaaatttataattcttcagttgtatttgtatggttttattactcaaagcaaaactgaaagaaaaagtatccatagtatttatgaaagtggagaaaataggaagaatattattagcatcctgagaaaggtaagcataaagaaaatacagtgaatactgtatatatttttgttagtaatgagaataaggttggttaatatgttagcatcagaatatgaatagtattaaaaccaaatagaataatttagatttgatagtgtaggcaaaagagagtcattgtagtttcttgatgtgttactaggcttatattctagtaagtcaccatcaaatggattgtttggtcttgattataaaatctttatccaaaccagggaatttgatcttcttagagggactagtcaaacaggtaacatgaatgtgtaaaactggcagaatgcatgaccacagagcataatagggcaagtggctaggaatgcatacctttaaatgcctgaaaatcaaatgtaaatgtggtttttttgtccaacaaaatatttttgtagttgaagttatgaagcatgaaacagtaatagcaaactacagacaagtagtctgtctttgagaaagtaacgtctatgtatacggctatcctcttgtaaccaggcattccaaggtaaattgaagtgtgatttgacatttaatggtactgaatatatgttatgttgaaaatagtgtaatatagtgttgggagggcaccaatgatacatttgactaacgctttgccctaaacatgaaaaaaatatatttcaattaggagttaagatacatacatttaaatataataagcaaaacatattagcatgaaaccattaacaacacagtaactacacagtggtttactgtgttctttcttttatattcagtcattataaactacatagaagtatgaaactgaaaaattgaagtataatttatattgcatattccttgtatgaaagatcattgttatcaagacatttcgcgctttattgagcaattttagatatttaaatatctaaaaatttaaatttaatatttaattaaaaccaaatagaataatttaaatttggtagtgtaggcaaaagggagtcattgtagtttcttgatgtgttactaggcttatattctagtaagtcatcatcaaatggattgtttggtcttgattacaaattatcaaaaccagggaatttgatgttcttagagggactagtcaaacaggtaacataaatgtgtaaaactggtgaatgcgttttaatactatctaaaaattaaatttaaaaagtttaaattttgctttttgttactaattataaaaatttttaacttttagggtactgttatgatggtggtctcaataaagcaataataatatctgaatcagaaaatttcatttctatattctagataaccatggatgaatttcctggttattcataaatttagagtcttccactattaaagatttgtaatgttagggaacatacaatgactcatgtagtttatgaatataatttcagtaatatgagtactatggcataacacagaaatgtctccattgccatggccatacattgaaggtttatttgtataatttttgtctaattcacaggaaatgtgatatttaaatacatatgaatcttctaaatttttattttgatattttccctggtgagctgaaaaaatgaatgtacttcatttgttttaaatcatcacattaaaactctagttgtaatattttataatggcccctttgtgactttaataagcagtattctcttagctttctttagggcaaataaatatatccaaatcaaaagagaattttcagaagatataaatttgttatatatctattgtacatataaatttattatatatctgagttgcttatgaattatagagatgccataaatggaatacaggtacacgtaattctaaatagctttttattgtgagggtggtatttaatattcggaaggagagaaacacaaggtaagaggaataatcttgtgaaaatccagtgtgcaagaagaaattcaataagcatgacttagggagaatatgtttacaagcagaggttgtaccgtggaacagaatagaaaagaatgaagcttcacagctgtgatttatcatcacaaaagaaaaagacaaactattcacattttatgcctagtgttaatattagggggaaaaaaacccaaaagcaaagtacaaggtaatacattttcattaattgagcagatgcgattgaataattttagttttggacctatgagagctctctgtggaatattcaagtgaagatatttaggaagcagttggacatatacacacagatgcagacacacacgtcacacacacacagaagagaaacaagtataatataatataatataatatatgactatgtcttaatatgaataacaatggaaattgtaagtaccctgacaacagaaactgtgtcctggtttcttccactatatctggcgtatagcaaggactgaaaaatgttgaataaatgacatgaagatcattgaatctatacagataagaatcaaactcaacagaatgaaaaatagcattgccagagaaatgatcttttttttctattaaattgtagagaatcctaacatataaattctaaatcggcagttctcaaacattttggtcctagcaaacctttacacttaaaaattattaaggattccaggaagctcttgtgtgcattatcattgattatttatctcagatattaaaagtgagaaacatttaaaatgtgtttgattcattttaaaataataagttacattctaaaaataataataaatcaattacatgttaataaataacatattttaatgaaaaatagccattgcaaaagaataaaaaattgtgagaagagtgatattgtttgacaattttaaaaatccctttaatgtctggattactagaagacagcttgcattcttatatcttccactgcattcaatctgttgccatgttaagttctgggtgaggaatgtaaagaaatctggtctgacacatatctagttgtaacataagagtattttcataacattttcagataatctttggtattacaccaaaatctgacaaatattgtttgataaagattaatttcagttttctgagacagttcaataaacttaaaattcattggtctatgttgtgctttaaatagatattttaatcatagaagctttgaaatatttgcaaaatattggttcactgagttatgtatctcttttaaatgttggaacattttattgtataataacaaaacattacgctagttgatatcaccaccagtgtaatcagaaaactctgatcagaaaacctggacttgatttgaggagtatgcaagttttccaaaatatttttatacgaaggcccaaattttatcattggcagaaaattctgtcagtttttcttgagctaatagtttaagtttattcatttttaagaaaaatcttccaaacacccaagtcttaataaccatggtttatatgtcagtcgtttcttcaagaaaaaacatgccattaaaaagatggctaattcagatcacaactcaatcatataaatgctcccccacccctcctgagtcaagcgtcatgctttggtctggaacagaagtgctttagttttacatttcactgtttttttactcacacatcaaggttttaatcaataaattttacttctttatcttggccattcttaagtgaaactagcaattttttattttttccattgcaagtgtgtagcagtgaggaatatgatgactactagtgtagttcggcaccactgtctgcctcattgtaaaatatcagtgattttaccattgttgctttttctttttcttatttttttttaccataagtgcaaatgtcaacacaatggaagaggcacatacaattttaatattgctatgaaaatgtttttcacctggcagatcactggaaagggtctgggggccccctagggatctgtggactacattgagagccactattctaaataatttctctctgtaagtactattgtatgaagtaagaagaaacagactggcttacaaaaacatgtaaacaacgtatactgttagagaagcaactcaaatattactttgattgaaaattttaatacctccacttggtataattttttaaaagtaatactaaatttttaaaagtaataccaaaatagagaaaatgttatgtttagcaatggctatgtttctgttccattttcgctccaggtgcatattctttttatttattttttattgctataggattgtgattgaaatataatttagtatagtttaagacacttgtctaaagggtcagcatagggtatgatatgaaaagtggatcattttaatagcacatccactgaaaatcaatctgtgttcctgagacattaccttatatgtcttcaaatatttaaaaatgagtggtggggattttactggatctgcattatagcacattaagctataatacctttatatgggaacatgactttttaaactgccaatcagttgtatcctttcactgaaatcgtactacatatgtcctaggctcagttatgcactagtctacttttcagatatgaatggctttatgctttatttttcaaagcacactttcatttagtatataccatacaatgagttaaagccattaggggaggtaccaagtgattgaggtgagctttgggctccattcattgcagtccccagtgcataaatatgatttcaacaaatttgtgttgaatacctacaatatgccagacagcgggtcagcctctgttggggaagtggtggaaatgaagatatgtaagatagagtcccttcccgcagaaaacttgaaatctaaaggaaagccagccttataaataggcaattattaaaatacatcagaattaactagtgaccagaattagtaattaactagtgaccagaattagtaattaactagtgactagaattaggtatacacatgattgctttatgggagtccagtggaaggaataatgtattctgactgagaaacttagagaaagaggaaggagtattttgtcaggtcttacgggagtaagtgagattttgctggatggggacttggtttgtcggttatattccaggcagaaggcaggctaagagtctgggcactgagggtaaaatatttggcgtggttgattaatggtgagttggccaccatgctccgtaggagaggtggctgtgcgggctggccttggagaagtggtaagtgtggtggggtgggggctgtgaggttaatccttgaaatgcttacccagatcttttttaaagtcccaaattaaaggaaataggatactgttgtaggactgctttgcagtcctaaaacttgccttcaagctgccttttcccttgccttttcagcctctctggtggtacatagacttttgagcatagccagtatgtctttctacctatataaagttaaaaaatgtgagaataaggtttaaacattggcccaattttgttacaatattttaatttaattactgcaacaatcataataataatacagttgaccctggaacaacacagatttaaactgtatggatctaatggattttttttcacccaaatggattttttttcacccaaatgcagatggaaaatacagggtttgcaggtatgaaacgcgcctgtactgaagaccaacttttcctgtgggtggctttgcagggccaagtgtggaagtttaatatctcggattttggtgtggggggtaggtgtcctggaaccaattccaagcttatacagagggatggatgactgtaatggatgtgttgtctcatttaatcctcctcctcatcactctctgaaggtggtactcttgggatccccattttacagacaaggaacttagtcttttaaaagtaggtgacagcattgggatttgcatccactcttaaacatcatgctgtactgcttcccacaatcttgtgaaagtggctcctattatttccattttacaaagaaggaaacgaaggctcagggagattaataagggaaataatttccccttattattatactatcgtaaataacaaagctaggattttagtctctatttgtggtgctcctcagaacttttgttcttgtcatgacatcatgctgtcagctcgtgttagaccggtcttcttgaggacatttcagttcttctgccacattcaggaccagagttacaaggaaaaatcctggcctgttcccagggtaagcagagaggagagcaactgatgcttacaaaattctctacccttgcagacatatcatgtgcatctctgaattaaaagctattgtgtgacagtcctcccagtggaaaaccaaatgcttggagaatatgattcctttcctctgtttgaaaacagtgttttatttttggtggtggtggttttctgcaggtaagcaaggttagtgacttctgtgtattggaaacagcctcattagaatcaactcgggaacactgaacacacacacacacacacgtacgcacacagatttacggaattctgattcagtggatcccgagtactgccagtaatctattttctaaaagctttttggtggagtcagaccagaagagtgtaatggtgaaagcctactctctgtagccacgtctcactggttttattcacagccatataagcaagtattagttttatacttgcaattgttttctatatagaggatagttaattgcccatattgattttatttatcactaattcttaagttcccccactttcaacttctcattttcatagtaatatcagttttagataggaagatgtattttgggttattctattgttaatatcttatgtggtttactgcaggaagttgttagagtttctccgttgggaaatgtctatgcttcggtattttcttgaaattctacattactacttattatggcaggttaacaaaaatacctgaataacgtgaatctttaagacaagactctgctgccaaaaccacctgtggaaagaggaatctctcagcacattttcatgacctttcaaatcaagaattgctgagttcatgtcagaaatgatagagttttctttccaaagcagtgaaactgaggtaaacaatataaatgatttgttcaaggtcagggaaggagtgcttacttgagtctcaatttgtgacttgggaccaccttttgtttcagttatcagcacagatttccctgtttagcagaaaaagctcagtataagaaagattttatataaattatgcataaagtaccattttagtcaagactttaaaaaatgccactgatccttttcatacctgtcctgaaaaggttcttattttctgtcttcgtactgtttgtacaaaccaattcaatttgacttgatacaagttatctcctagggaataaaaaattgccccatattaataatcagaggtgatattagcttgtggcatattgttcagtggagtacctattgtgattgatatcagcttgagtcttgagaagcatttttattgttcaggagctaggtaaacagtatgttaattgtgtgactggttgcttttatcattctcaatgttgcctggcatttatttatgtgaaaaatgtattgtttggaaaggtcctttgggatctctcagaccaatactatataaatgtagaccattatagttattgatacagtcatgtgtcacttaacgttgggggcatgttctgagaaatgtgttcttaggtgattttgtcactgtgcaaacatcatagaagtatttatacaaacctagatggtatagtctgctacacacctaggctatatggtacatattgctcctaggctatatacctgtacagcatgttactgtactgaacactgtaggcaattgtattagtattagatacacaatggtatttgtgtatccaaacctatctaaacatagaaaattacagtaaaaattcagtattatgtatatgtagtctgttattgaccgaaatgtgtgtggtgcatgactgtaatttatagctgatgttaaatcagagttataaacaagcattagtaataactgaaaataattatacaaaggggttgtgggaggatcaccaccaatctcaaaaaggaataatgagagaagattgcattaggaaaattgagaacagtgatttaaatctcttggaaagaagtgatataaaacactgctattaaatattaggtaactaaacgtaacaccgtggtcttatcaaagatgtaagatgctaagaggtgaatataacatatttatttatactttactaatataaactatgttttgtatgtggtgtgtgtgtgtgtgtgtgtgtgtgcaaacacaattttgagtaactttggatggaatctcaaggtgattcactctaattcccagctactgctcctgttctcactgctactttattagaacttttgtcatcagattagaatggggaaagggagtatatcttttcttccattaaaattgatttaaaaagaccttatttctgcttgaaaaggatgttgccaacatatgccttgtgaaagaattggataataataattagtccttttaaatgtagtggttgatatgaggatgtctgcattcttctttctcttctttaataaactgtttggaaaactgccctacactacagccacactgcccatttccctcttcagccttctggaatctggttccttctccttttcttcctccctgtaccaatatttccttcagatctgatttgcacgttgctgaaggctccaaacatttgtgctgctcatcctaagttatgttgttaaagcatctgagacacttaaccttcttggagtttttcatcaacatctgtggatctctccttctttcctcccctactcctcttcctccccctcctcctttttttccttcttttccttctcctcttctagcaattaaatatttgtagtctatctaccactcatgctttcctcaacgtagaatttcccagggctctatgctggttcctctgttcttctttctgcatcccccaaccccccactcaccccccacactggtaatcttgaccactcctatggcttcagccttctcttctatacagatgattctcatctctctagaaagatctagacctttcacttctccaactgtatccttcacttggatgttcaactcatcaagttcaaaattaggtgtattaactctcacttcacacctatttcttctcttgagtttctcatcttagtgagttaaacagcatccaacctggtcttccaagtcagcaaacttgaaccagtttaaactactaaacttgctttcagtatttcaccggtaatgaaatatcttgcaaacctgttcttccccactagattgctcctatcttaattatttcagtaacattttattcccctctctctagtgggctacgtgcagcagccagagggcttgttttcaaaacacttctatcatcatactttcctcttgcttacagtcatgaaatagctccctgcagctttcagcatcctgcctcaactccttggcttaacacatcatacctgtcctgaaaaggttcttattgtctttgtactgtatgtgcccttttctctggctatgctggactttgtgattctggaaatgggtcatgcccacctttatgatagcacatatgttgttccttttcctgaataattctctcttctgtttttgacatgtcaccttttactctttatttttcaaaaccccatttcaccttttactctttatctttcaaaactgaggtcaaaagtcacctctagaaaggcttctctggcttgagatcaccctcgttagtgttagtctgatttcgatgttccacctacatgctcctttatcagtaggtagcacttaccatactgcaattgaattgcaaagttacttgtctgcctccaccctagactacagctttttgagggtgggagtcatgacttacttgaccttacattctcaggacttagtttagtgcatagctaagaggtgttcaatagatgtttgctgaatgaatgaaaaacttaatggtcatttgaaatggctttttgtacgtctggacattgctcaggaagggaatggaaaaattacatactagtgaattttcagtctagtattaaatttaatatcatgagagaggttgtaaccaccttgcccgctgcctagacagagccgatttatcaagacgggggaattacgatagagaaagagtaattaaagagtaattcatgcagagctggctgtgcgggagactggagttttattaccacccaaatcagtctctctgagcattcggggatcagagtttttaaggataatttggtgggtgggggtgccagtaagttggaagtgctgattggtcaggtcagagatgaaatcgtaaggagtcgaagctgtcttcttgcactgagtcagttccttggtggagatcacaagatcagatgaaccagcttatccatcttgggtggtgccagctgatctatcaagtacagggtctggaaaatgtctgaagcactggtcttaggctttacaatagtgatgttaccctcaggagcaatttggggagggtcggaatcttgtagtctccagctgcatgattcctaaaccataatttctaatcttgtggctaatttgttagtcctacaaaggcagtctagtccccaggcaggaaggaggtttgttttcagaaagggctattatcatctttgatttaaactataaacaaagttcctcccaaagggacaggacagcttgaaggttagaagcaagatggagttcgttaggtcagatctctttcactgtctcagttataattttgcaatggtggtttcaaggttatcattagggggagaatgagaaagactgtattttattgaaatggtagtaagtggagagatgattttgaatctctagaaactcaacagtattactgtgatgccaacaacattgacttaaagattttccaatgagatgactctttggatatttacaaacataagcatatttggtttcatatgaaaaagctatttacagtagtactgactgcacttttccatttctattaagctgtcttggcatcgtgtagcctcagaggaaatacagtagcaaaggttagaaatatttaaagcagttttttgcctaaatgtaaggagagggacacaaaaacatccagtttgcagttataaactcataacattgacacccattatgtcataacattgacataacattaattaccaaggtaattaatgaataaccttgttcaaattacaggatgggctgagtatatcaagcatgacaaatggaaatgcttttgcttgtttcagcagattgtgtttataaactctagagcaggtttgatccctctttcagggggttatgtttgcacatggcttaagaaattaaaaataaaaatggcttaagaatttaaataggtacatagttgtaaaggtgttgcacatttccaattagtgagaagagaccgtacatgtgtatgtgttaagttaggttatatttctggtttagcatggcacattctgtcggaggatttcctggcccctggttctggaatagatcacagaattgctgttggtgttgcccatactaactagagtggtgtaggaaaaggccccatttgtgctgagccatgagtcttttgtacccagagcttacatcagccttctggaagaacttaacattaacaatctgtgcacttctatttaaggtattgtataaaaatattgggctcttctggttcttgaattgaagttagcattagcaaggcttcattctcatccagggaaagaaagatgggtaatgcccaggtgtccctgcttcggcttccagctttttactgttcagagaacccattccctgcaggtgctcaaatgggactcacattgtctccatctgtctcttttattctgtgtctctctttgttcttgtgattagagcttttgaattgtgggtgccgtctaaaaaagagtctttgtgttttcttgattttagtctactgcgaggacagagtctttacaatagtaaatagcttttcattctgaaaaaataaataatttatcttaatctcggtaacaacatggcgtcctttgtgtatgaagaagatgacaacaatttacttgttcaattattttcatggaaaaattcttaggcatgtaatccctgcctttaagattcttgatagctactctcaaattgctgttcatagtcatatacataatagtaacagatcaatttatctatcttcccacacattcaccaaaactgggtgttattatttttcatctttatatacatcagtggtgaacttaattttattattatttaaatttgaatatcattgattcctaatgagatttagagtttttgtatactaattagccattgtatttattcttttgcaaattgcctgttcattactttgcctatttttcttttggaatattcctctgtttccttttgattgtcaaaatctctttgagaatacatacattaatctgttgtctgacatatattttacaattgtatttctgtaattcatctattcatatttggtgttacttgccctacagcaatttaaacaaattgtgagggcccatccatcaagattctcctctgcactttctgtcatgttatgcctagaaatgtgtaacagtcctatggaagatctcctgtgaaaggcctggattggccaaaaatattaactttcaaaaaggtttctcttcttttgtactaccaactctctactaaataagagtaatataaataagcaaaccctcccttgattactgactaccaaatgtctctctttcctggtgctaaacacctttctcttttctcaccactgctcccagagtgcagatgtcaataaaatattttgttttactcttacctgataagttcatgtttactattatatcttgttcacaggtcaatctttgaactgggaaattcgttttaaactaaaatagccatagtaagctttcaggacttttaaaaatacgtattttcttgtagctttttcatgatgtcattttaataatgaaacattgaattcatcttcattttgtgttgtaagttatgaaatagacatctaattttttgagtttttgatagccagtatccaaagttatttctcaaaaaactcatcaaatttttttagtgatgtggaaggccattttaatatattattaaaatgtaataatatgaaatattaagaatatattactatacaatattatattttctagatctgctatgaattgtctattttattaatctggctatctttttttgtgctagtatatcattatttaaaatattgccatgatatatgttaatatctaatagggcaagccactgccattagaatgggtttcaaaattttgctggctttgtttttgaacatataaatacatgttttaaaatttatccacttaactggaatttttttaggaataggataaacttacagatcaacttcgagaaaatactatatctgtacaggggagcaatgtgtacattttgtattcaactcatattatctctcagtagtatattataatttttaatgtagttctgggaaattcccactaagtttatggagatttgatatttgctgatgttattaatgtgttatgactgctaattaaatttttctcattatttcaggtaattgtaggtatattaagaagttattgatatgcttaaaataataatttttaagtagcacttttatttactaactgcttccagtggaatttcagattatcagttatttttattcttatttcttttacatgtctaattgcattggttagcacatctggaatgacatggaatactgattgtgatgctgggcattcctgttttgaccctaatcctctaatactgcaatttttaaataatgcctgctgatctctgatgtcactgttgaccatcctaaaaatgatttctaatttaaagttttactaaatatagatacactataaattttgtcaaatgccttgtcacctatcaacatgatgatgtatttttgtccgttattaatgcgtttatcaattttttccaaatgtctaactacactgttttttgtggaataaatgcttctttgatactgtatattgtttttaatataatattagatttaattttacttaatatttagtattttattgagaactttttgcattaatatttataaatgagacttagttacagggctttatttttttttcctcttttttttccaagcaagccacttatttttttaattaggaagaaagagacactgttcatttccaaacatatagcctgacataatacattattatattatcaatttaatgtatattatatataataaagtaaacaaatactttcacaaagtaaaagcaagaaaaatttgtgctttgctaatctttcttttattacagtttccattaggttggatcaattagtgttaaaatgtcctttaatagttctaacattgttttcactttatcactttatcaggaaggacattgctctttataggtgagttagtgaagaagaaaaaaaagtgatgactaacatgatgtaaatcaggggtgcccagtcatttggcttccctgggccacattggaagaagaataattgtcatgggccacatgtaaaacacactaacactaatgatagctgatgagcttaaaaaaaaaattgcagacaattttcctaatgttttaagaaagtttacagatttgtgttgggctgcattccaagctgtcctgggacacgtgcatgtagcccataggccatggttgggcaaccgtgacctaaacataactgatttagcttgaatatgcctttaaactaaacaggatttttttattcctaaactattcttaagaaaattcagattttccatatcttgaaattttggtacagaggacagtgattcaatggaaagtattctacacttgaaaaaatttaacaatgataaatgaaggtattttccttatgtgggttttgtgatatgctgtaacatagttgagcagaccttcacctaagcagaaattactagctcaaatggactgcacaaataaggataagtgaattttttgatctgctttataaagctctctatacgccatattcacatttttaatgaaacaggaaaaatatgttttcttctttcatatgctaagtgattacagctagagaggttgacctcactaatatgtcttcctctaatttgggatatgaatagattctactaataactcttaaggcacaattcacacaagatgcaaaattcaaaagaataaaaagaatgtgttaattggggactttggatttttcttaaatgacttagagatatttgctgttgctccgaatggatatagaagacttaattacataatttcttaatgggccttttaacttttataacagatgttcttttacaactggtcttttatcatcattaataatctgcctgtagtttttcagtcgtatagtataaattagtttattgaaattatattaaacatttaatatggtgaaaaaatatattatgataatgtttgttctggctacaaactaaatttaatgactgtatacaagaaataactactagcacatttaagtaagagttttggtgatacttgcatgctgagggattgtcaatatggtagctttccatattccagtttttaccccatggcaattcttccaatatcaaatgatgttataccctcaaaatagaaaatatatattatctgttagaattctttacagtattgctttaagaacatctcatttaaaaaggggaaaatactccttaataatacaaataatatacttaattgattacttagatttattttttatttatggatatttattagacatcatagaaaatgaggaaataataaaatgatatagtctcattgtctctggaaaaatatttatgatagaaattatatgaatacatatatgtattgataataccatgatcattgtaataattgtgcatgtgctggagaaatattctaatctaaatattgacttattcctggtggtattgtggaatatgggaatatattaattgtagaagtcagtaggagatttgggatgcgtagaaatagttcattttggtaataaaatgtcacagaatgcacaagttaagatggtcagtttctggtaggtactttgtttctcttttgtttactaccattgggaatattcggccaatattacttcaatttctccttctagaaaatttagaaattaaagataaatataggaaagggaataggtggaaatagaaatcaggaaacgcaaaaggtgattcttcaaatttctggcatgattcaagttccagggcaaatatttaattcaaagttgggtctagaggcaagtcagttacacaggaagtgctcaggatattgagtggttctctcacgtcctcctgagagtggccagggtatcagagtgaataaaatggcttctctatgagatctctttctaattaatcaatattatagctttaccattgggacaccaggagaagacaaatgatggaaaaaatcttttatatacatttctttccaattgacaaatttggcttaatatgaaaaattcatctaaagtcttcattctttgaggtccctttaagcatataattgtattccaaattaattcttaaaacatgtataatttgttataacttttaacaaggtttgttaataaaatgctgtaatgtttaccaaacaattatattcgagaaaagagatgttatacagatttatcgaaaagagaatttgataactaaattaagtaaatgccaactattatccctaaatgtagatagtaaataacattattccttctatgctgtgtatctaaactacctgtttccctaatttttaatttaattcctcaacattatcttaactttgatatatcaaagtagtaactttctccatattgagcctcatatttaagcagttaccaactattgctgttttgtttatcgcactatatctttcacgttcccttctctcttttcaaatgtttgtgacaggcttctatcctgcctcattcttccacagatacaggttagtgccccttagctacttgatttttcacaaagttctcaacagttccacattgtttacaaaataaaatattcttaatttcctggtctgacatccaggtccccccacagtctaccccaaattcacttttccaaatttacatcctgatatgctacagtgatttctgtatttccagtccagctggtgtattcactgtggcaaaaattgaccttgagcatctctaatcttggatctttgctcaggcattttccaacttcaaaagtgctcttattttattttttttcctatccatacaaatacacatcttttctttcaaatctttgatcaagcttcatagccttcattatgatcccaaattatttcaacttctaaatcagtgcattgctagtactatttctttgacacaatttatggtttatgtgtggaactgttgctaatcttcctagttccatgagtcttacatcatagtctgatctgaatagaagacactcaaacattactcttacattacttctttattcctaagttgttacttttgattctcctcttatttgatcgatgtgttttgtttttccaattgaactttctcagtaaaagatcgtctttctaaactcttgcatatctgatactatatttctattatcttagcttggaacacagacttttgctccagaactctttagatttgtgacattgtcatccagcagttaatgtagtagaggtagcttaggacaatctgatgtccattcctctttagttaaggtctttacttttgcctcaatacttgagagacatttacttattcttacaaacccaaaaataattttgagttaaggcttcagtgggatttcagagctcgagatcctctctctgagatcttagatgaggaaaaagaaatcataggtgacacaaggtaatcacatacaaaagtcacttcatttagggctagtcagttacccagtatctgccaaatgcagaacttctaaactggaaaacacaattaatgttttggaacttagtgaagttacctgcttgctacttccccagtgctggactggtaaaagagtggagaactaagacagggagagaaaggagaagaaatatattacacggcatataggatatgggcaactgggtcttagtttggctgcagacttctggaatcgacatggccttaatttttccacccaaggggtaaggaagctgagatagttatcttccccctcaccatagtgtgaaggccattccctggagttttgactccttggctcttctgtcctgcttagcacataggttgaacatgctcctggggccagatgacattttctggctacagattgcaggtactagcagtgtgaagccatcagagcactctggaatggtgactgaggagagggtggggcagcaatcatgtgggctacaattggtgccacgtgagaaaatgaagcaaagggagggtgaatagctagctgaacttcatacaggtgggaggggacggaatcaggtctttaatcactatgatagcttgccattgcactcaagggctgtgaagcctttatggcagggtgaggagaaaaagagtgaaggaagctgctacttaagcagtgtggtcagagaaaaagcctttctgaaaaggtcctgtgtgaacagagacctgaaggaaatgaagtggtgaggctagcgattatctcaggaaagaactttctggctagaagagtgtctgacatgtttaaggtacagcaaggagaacagggtgggcagaacagggaataagggcaggcagctgggagcacctcacatagggcccagaagccagcaggaagcctcccctggaccatggatggtgtccctccttgtcacctgttgagctgatcagttttctgagttgttcatctagctcctgtattgaagtgttttcaaaggtcttctcttcctatgacttttcagaatcaagttttccttgtcttcgagtgtttttcaaagttactgtatgtttttattttcttatttgtgcatttgtgtggacggcccacctctccagagccagtgtgggtatgctgcttttctgagattctttctctgctcctttgtttggtctttcacagattgagaagacaattggaacacaaagctccaagcccagttcctagtatctaggaggctttccttttctgcatcattactgctctgcaatgggatcttttcttctactcccgctgtgagccagccagctggggtccatatttcttcaggaagcaaagggaaattagtggttctgcacagatagcattccaagcagcgctgtcagcaagggcacagacaggaggagctttgtgtggcacagcactgtgagaatggccttagttcacgtgtttctcccttccttgatttgctacccatgtgctgcagtcccctactggatctgtgaagagagcactaatggcagtggggagggtgcgtggcggatagtggcagatagattactcatgctgcctttaaagcagtggctgtggagtagacaagttctcaacaattttcttcctggcatttcttaaaatgaggttcacatgcatgactcacttccttttgtgtctatagggcttagtagctccgcccctttcagcatgtcaatcatatcagaatgtaagcatcaataatgtaatcttatattaattgtgctcatgtgtacatacaataatactagtaaaaaactacttgctatacacatcccagctggctgtaatgcccagctactcaagttttcaggttgttaaaattctattatgtcttaaaggttgtgggagatagatattgagtgtggagaggcaaacagcaggggaggacctatagttttgtttttttaggggtgtgtgtgtgtgtgtgtgtgtgtgtgtgtgtgtgtatgatttcagatgagcaagtgttttctgttctgggcaatccaccaggtatgctttaaaatccactttaagccattttgaaattctttccagatcctggaattaggcttactgtaagtacctgctttaaatgaggtatttccttttatgttttccttagtgtttatagttattttagggggaagttagaaaagtttgtatctgggacatctacctatatggaaactgatcccattgagttgttaagatcttcattgtaccaattcattaagcataggtttttaattaaattcccatgtagtcatatactatatttaaaaatcttacattattctgaggcaattaaagttggaatcaaatattttttctaaatatatacagatttcatgtattaatatatgaatgtcaatgatcagcattttttaaaaagtatgttcttaatgcactcaaatgtgtcatacccaacccacagaattatatagaatattctaaatgcagtcttgttgaacctatatattgatatatattaatattgtatgtaaatattctatatttatgtcatttacctacttaaatatttggtttaaatatatttagataatagttaaaattattttatttttatgattaaatacacgtaagtatgtatagaatttatgaaaaagttatgcagtaattggaacatagctaattgagaactatgatatactttgggtgaattttattttattaaagaggaaaatgatatatcaagaatatgtaaatttatattaagtgcttgacaatatttttataaataataacacattactcatgcaaaccagaaatggtttttttttcttggagcaaatcttgggtggcctatcttggttttgtcagaattttctttagattggaaggtttgctgggcttacagtttcagatttttaaaaaacacttgtttcactttgtatagctctgcagtaagatataccaatttttataaaaatctgaagatttttctgggagataggggcagatactttccaattcctcttttgttttctgaattataatggactctgtctcactagtagaaaagggccatcagattctggaggattttggggaagataatggcaataggaccagggccccagccctgttctgggccaggatggggagtaagtgacagaaattgttgaccacttggaggattgggaccaccttgcctgggagaagctttttatcccaaagcagtggccagagcagggacccgctcatcagcacaggcacagaggtgtatcaccccttaggagtctggatccacatgcttgtgaagggtctggattagtgtatcaaagaactattgactccaagtctcctggtccatctagcaggcaagccactgaagtaggggcttgcctgctctccaagaatcacagaacaaggggtctgtgactgccactagaatggggacttccctatcctctacgttttttttttaacctgatccatgaatgataaccatgatatagtggatggcatggagtttactattcatcagacactcttaaaagagtttaacatgtattaattatattacttctcaaaaaatgctgtgagaaaatattattacttccatttaacattttcttcaaaatgaaacacagagaaatactgtagcttggatatttgtccctacccaaatctgatgttgaaatgtaatctctagtgttagagatggggcctggtgggtggtgttttcatcctgggggcagatccctcatgaatggcttaggccatccccttgataacacgtgagctctcgctcttgagttcacaggatatctggttgtgtaaaagtgtgtggcacctccaacccaatctcctttactcctagtctggccgtgtgatatgcttgttcccgctttgccttctgccataattgtaagcttcctgaggtctctctagaagctgagcagatgccaacgccgtgcttcttatacaacctgcataactgtgagccaatgaaaccccttttctttttaaattacccagtcccagatatttatttattgcagtgcaagaacagccattatataacacaggtacatttaaatgtccaacctgataattggttaagtcggcctcataagcttatattcttagcttctaggtcattccttgtttctattggaagccagaagacattctgttacagtcagggctttagagtaggagtggaccagattggattattctgtattccttccacttttagccttactattagtcaacatagggattgtggaccttcgtcctaggcagtgtaagtcttggaaagaacagatagggcctcctgcttctatttgtgaggtcttgagcatcacaatctggggcctgacaagggcatgttctttgctcagttgtaaagagggatgccttgggttgaaataaacatgcgtcacatgtatttatgtacgtgattattcacaatctaagttaaaagtgacacacagatcactttctttcattaccaagtataataaaactacccttagagaagccaattttgtctgaaaatacaaatctaaaagttggctacaatctacctgtctgctgataacttgtagactgtacactttgatgctttcagaaacatcttcagtcatcttgagcaaacatctgttcttgtcatctcctttgcaattcattttcacagcatgaacctcatctgagagatcccacagactgtaaaacctgacacaaagtactatttgtttccagctatatataagaatgtgcatccattcaagtaactttggatgtcttgtttatttcattttcttctcttccccaagccagtgatttttcacttctttttaaagtactgcttaaaatcagttttgaagataacaggagatgtattaaaacagtcaaagccccccaatttttttttttttttgcaaatagtttattatacatatgtacatgttttcagctgtcccttttcaggcacatattttaaaatgtgctttacataaaagtgttcttaagttacacactttccacaaccataaagaagataaatggatcactatgaagcattcctgagatacccatacatatttgttaggttaaccagttgtaataagcaatgccagactctcagtggattgacatgaaaaaggctgattgctttataattatcacagtccagtgcaggtaagtgaggctgagagggacttttcctccaggcaatcattcagggaactaaggttcctttcacacagtgacttggccatcctctagggcctcgagttttcctgctgtatatttgcacctcactagtcaattgagggaagataataagcatgggagactcagcaggaagcctttcagagccagatttggaattgtcatgcaacacttcttgcattttattggcagaactcaggcctgcgcttaactacaggggatgctgggaaatacagctgcctgctcaggaggaaaagaggtacagtttggtgaacaattagctaatcttccatatctcattgaagagaactcacagtagtagctgagtcggcttccttcctctaagccttgagaggaggactcaagtgaatcacgatatctccaagcagagaaaacataaaaacataatcacttaatcacctcacacagacacctgtttaaaaatgtatgccctctatgtaaatgttgttaggttttgaagggaaactaacaaatgtaaactcctggaggccaggagtgcatcatatgcataggtgctgcctttactaaaattaacagtttctgattttttccttcttgttatttctgatcacttgtgttttttaccttgacctaaaattcttcaacattcttacttttcacccactgcccagagtggccgaacttaagtagatgttaggagacatagagtttgcttagatgattcacacaaagatgtagctaattgtaaaattctcttggagtttcaaagttctctacagatcattgttttcagtataactacactttcatttgcccacacctatgagtgcaaagcttcccaaagtattgctgttaacaagaacactgattcccttgatatctttggcagtgggtgtcctgttgcctaaagtgaaactttttttttttttggttcgcctctgagcattaataattacaaattcttgagccattgttctgattctgtcatgttctgaattctagcatccatgggggtctttaattcttggcttattcattctttattccagatcagtttgcgggcctctatttcctccacccaggcctgttccgttggccgcaggtctacatctgtagtaacttctcaaatgaagccaacagctaacagcaaatggggattcttaattgacataatttctaaatataggtgaaataaagaaatgtaagaggtctcatgaaggaggcataattgtgaagaagatatttcttatacctcttcacatcatgttttttaatgccacccgcagttagatctgctttcatctagatgaagaggcagagaaaggggcgttattacagcccttcaatttctacctcttcctgaggaaataaggtgatctgttctttattaataaagggaaaagcaccctccaaagaaaacctgcaaatgcacagccttgtctgatttgatttatatatataatttatatatatgtaaattatatatataaattatatataatatatgtaaattatatatttacatatattatatattatctataacatatatattatatataacatattatatatataattatatatattttttttcacaggctctcaggattaggcatgattctgcctatcacaagcactgtgccaaatattgggtgatagcccctctccttaaagattatgaagttcattcaagagaacaagttataatgtgacagtgctgtgatagaaatgacccacaattattattgtgatacgtaagaagactgctcaaaacagaagatgagaagggagaacatgttatcatggatgcattcttgcttgtgcttggtttctttagtgagaaaagggtagcattagctgctcaaaatataagcagtagcagagagttggaaaattatcttcaaggctataggaaacaagaaagactttttaagctacacagtgacataaatagtttgttttttagaaagatcatcttcatagtcccatgaagggctgattggagagagatgatcctgaggcagaaagatctaaaaggctatgacattcatctagtggatgatgatgagagctgtggtactagatgcagaacctgaggctgattcaagaagtatgtaggagatagattgtatgacacttggtgatacttggctagatgaaagggataacaaaatagaatctaggctaactcactttcctttaggtgatggaagtgttgctaattaaaataaatataagaggaagggcactctgtagagagaaaatacacttagttttaaacatgttgggttgagttcctcatgcagggttctggagaggtccagttggaaataagattaaaaatttttatgacgcccaggaggaaagttaaagaatagagtgtccgtgcagatttgatggaacagtatcttctagttattcatgatacccagtcatagttcataattttattagaaacatgcatataaattagtcacctcctgatgtccctctgcttaagtgttcattggtacaactttgtctttcaaatcctgggattaggaggtcttgtcctagcctaatcttcaaaaaagcaaacaacaacaaaaaaatcagaacagctagagggtctacaaaatgaggtgaggattaggcctattaaaagaggcaccatcaggagtgttgttccttgcaaagttggagaatggggtagagagacttagaggaagttttcgacagtacagtttaatacaggtagagggaagtcatcttcacagacagagcttgattttcaattaacatttgttaaatgaaagcgaatcaacaatcagaggagtgcaggagaggtcaagtctaagtagaaggaggtaaagaaagaatgaaaggaagaaagtattaggtaaattgaatgttctgtgaaaataaattgatcactttgatttttttgatgaacctgggaaaatatctttgaagtagatttcaaagaaatttcacaataagtgttgtgggcaatggcaacaacaccaagaaagagtttaatcttctgaaaggtcatggaagcatgcatttctttagatgcatgtattattatagtacagttggtaaaagaaatgtttcatttctttataacctcattatattcattctttaaaaagctcaaaggggaaagcagtgctttagtgatggctgcacttcagtattgtaagacaaagtatggtgtttgggtctgaattgaaaagatttttgattgtgtagattcaggattagacccaaaattgtgtgcctttgggtttgatcaccattcaagccaagccctgaggcttttgacattgtgaagaaatagtgacagatcaaaggataaaaagaaaaatcactgcagataacattctgttcacacattttaaagacaggtatatcctatataccattggggtgtagggtcaagctgttagtgctgatgagatgtcagctcaagagagcagaaaacattttatgttgtgatgacagtagaatggccaacacactgatctttaatctctgtgtttgctagagggaaaaagtgaaggaaggcagcaaaataaacacaaagcagtttcctcaaaagccatctgaaagctctgagtctccccatactcttcttagagatgccaatgaaaattctacctctgtctagtgaaagtttacttttttctcattttcctgttttgtaaaagtaagacaaaaattacaaagaaatacctttggtcgaggaagtattaatatataaaattcagttggtataagagatccacatgtatttttgtctatttataaacactaaaagttttatattttattagtatattagaattatgaatcttggaattgtaaagacagtgtgtatggggtctcagaaataatctacttatcctttctgtgtcatccttttcaaatgaatatactgcaacatttttggttaaaagttaaattttgctttcattatattcacatatgaaacccttgtcaggaaggttttctgtcagaagaatgatgactgctctaataaccacttattcatttaagaggcaacttgtggtcaggcacagttgctcacacctgtaatcccagctgaggcaggaggatcgcttgagcctgggactttgagaacagcctgggccacatagaccctgtctctacaaaaaaaaatttaaaaaattatccaggtttggtggcacatgcctgtagtcccagctactcagaaggccgaagaaggaggattacttgagcccaggaagttgaggctgcaatgattatgccactgtactccggtctgggtgacagagccagatcccatctcaaaaaaaaaaaaaaaattgtgagaataacatgagttaaatatacataataaaggaagaacaggaagagagagacaagaaaggaaggtaagaagcagaaggagaggagggagtgacaagtaagaaagggtatgtttatagtatattgatataacagctactcttactagagacattataaattagagacactgataaaattatcactattactttaaaaaacataacattggaattagaagaagtaagggaaaagaaaaaatatagaacttgctatagaaatcagtaaataccttgtatttcttttttttttttttcaagactaaagactatcttttaaactaacagctgctgctttaaagaaaaaaaaaaaaatccacccactcttcaagtctctgtctatttgtgatttcccagctccctggaggcctggtgaattgtgtggcatttttgcacagaaagattaccctgctaaaaactagtggatcacagcctgggcaaacttcagctatcacagctatcacagggctgtccaataatacacctctgtaaggtgtcgtggtggttccttggcccttcattgttatttttcacacatgttgactctcacagacttacaacagcatactttcatgtatgacatgactgacaccttgacaaaatcatttacaacctagttcatgactccttttagtacaatacctgaaccagacctacccagttactggaatatgattgcagcagaattcctataggtttaaaaacatgctgatgaatactttattgagtaaacattttattttgaccacttaatgtagtttagaaagtgaaatctatgtttgtgttaataacaactactttcaaaatatccttttatatcactcagtaagttaaaacgattaatgcatactgtgataatttattgtgtgccaaaaattatgcaaaatacttttatcccatcaatattatctcatttattaatttatattttatgataactttgcaaagtgtctattattataatacacacttaggtaaaaaaagatctggagttcacagagctttaataatttttctaaaccctcccaccttttcagtagctaatctaagaattgaactcacatgtgtttgactccaaaacccaggtaattccattgtcccacaatatgcagtattgattttacattaaattatttccaaagtatataaaagtaactatatgaaagataatggtacagaccctaatatttttccttaaagaagtagatagtaaggttatttagctggaaagtatggcagattatgaaaatgatttggagctaccctcatgagaaatgtatttgagtatctctaaggagttcataatcatggtgagagcccaagtgaaagtggctgacacgaacatataatagtgcagtaactggaacctcgtggcactcaggccgttctggacatggaagagatagaaagcatgaacaatggagctgatccctgcagtgaataattctagagggctggagatgcaagtcaaatggaaagtctgaagttcacatgtggttacatctacctttgactctcagttggctatgatgccctgcaaagtagctagtggaggcatcaccctgaaaagtcctggcctccaccacacagcagcaaaacaactcactagcacagggagacaaaagctcatcactacaaattcttgcaaataactcaccccaggatatgaaatttcagaatcaaaatccaaaaaatctgtgaatcaactatacccccaccctagagcttgagcctaaaatagtcaggtataaacactcttggtcactgaagtacgcatttttttaacctcctaatatggaacaagcttagccttccctctggaaaactgagtaaatagagaaaaaaacactgaagttattattattattattatttttgagacagagtctcactctgtcacactgagtgcagtggcgtgatctcggctcactgcaagctcccactcctggattcacgccattctcctgcctcagcctcccgagtagctggggctacaggcgcctgccaccacgccctgctaattttttgtattttttttttagtagagacggggtttcaccgtgttggccagggtggtctcgatctcctgaccttgtgatccgccggccttggcctcccaaagtgctgagattacaggtgtgagccaccacgcccggccaacaccgaagttattaaagacatcaccattcaaactaaggaacctatctaactatgtacttatgaaagagttactcctagaaataagcaaagagtttagatgatgttaaatttatgttcttagcacggtttctaagtaaatgattttttgtccataaaattattccgatattaaccaaaataattggtaatttaagtcctgttataattttgagtaaataaattattgcctcctaaatttttatgtttttacaagtatgtaaattggtaatatgtaatataaagggaatgtattttaaaatgttagattccacaattatttgaagtagaaatgcaggttacactacaaagtctacttatttgaaatagtatgtagagaaagcatggttattggcctgtattacttttcctaattgtctctttttggggaagctttgtccatagttgtatgtcccaaagtccatagttgtatgtcccaaacatgtttgagctgccctcctggtgtgaaggagggtgaaggatggctgtgtctggtgagcccgcttactcccagcactcgtgtccctggatggctcacatgcatgctacatgaaatctccacaactcttatttcaccctccaccccacaagcctcgaccttcctgtcagtcacaccagtgctttccatctccacccttctagaattatttgcctcagggatcagctccattgtccatactttctctctcttccctatccagagttgcctgagggccatagatttcagtgactataccataatacatttgtgccagccactttcattcaggtgctcaccacaatcatgaccctctaatagatgcccaaatctcacaaagatggtcccaagtcattttcataatctgctgcatctctcaggcaaatgatcttactccctatttcttcagggaaaagttttaggctctttaccatcatctttcatgtagttccttttctccacctcaaaagattttaaggaactcttatcttttttctgctcctcttgacatgtttattattcctccctactggtggaagaagagcatgctggcctcttagagaataacccctccactcatgttcatgattcttcctcttctccctcatgctttcctctcaatcactcccatttcttcattttctctctcctcaccgataatttattttctacctacaaacattgtaaaaaatcatacatgagagtagagagatccttagaaacatcctcagggagaatgaaagtccttggctcttgaagtttctgggcacaggcacacatagaatacacaacagagtagaagttttggacaaaagagagcatgcatcaggatgatggaggtgaaaaccaacatttcataggggaatttagggaaggaatcctgagtgatgcatcatgaagtcatacgttctagcagcacccaccctcagcacccaaggagaatgacataggcagatgccacggggagcaaagggtgttatagaaaaacagtaactattacaagcctaactgatccctttctgaatttcaacacttttttttttttctgtagagaaataacttagctgtcaaatatacttctctggctaactgcttcacaactccagatagttacagaaattgttgctgccaacatgagtctcaaattaggccaattagactacaattcaggagtctaagaccctgactatatgtaaggaaaaaaaaaaactgttttgaaaaagaagccagatgagcattttagagagagaaaaaaaagtgtttattcaatgtttattcagttttcctgcctaaatttaaatgcttcttaattcaattaaattgtgtcaaactgagtattattaagcacttactatatgtctgtctgctctagaggatgcaaatatatttatgcctaggtgatataaaatctattttaggtgaaaggacttatgcatgtgaaaaaaaattagagaacagagttcaattataagcaactgtgaaaatacatgctcagttaataacctatcatggtggtcagaaaaaataaaatcagttttggttggaattatccataaaggaaatgggacagaaaagccattggcagtgatagaaagggtatttgaaaagataggagtaaggttacctcagcctacaaaagcaaaattttagctatagaaacatggcctagctatatttgaatattggtgttggagagatagagatgggtgcaaacaaatacagtagatccttaaacaacatggatttgagctgcatggatccatttatccacgaatttttttcaataaatgtattggaaatttttttggagatttgtgacaatttgagataattcacagataaattatgtagcttagaagtagcaaaaaatcagaaaggtaggtataccacaaatgtaaaaaatgtagattctagcctattttattatttactgccataaaatatacatgaatctattataaaagttaaagttcatcaaaacttacacactttcagaccatacatggtgccgtttacagttgagagaaatgtaaacaaacttaagggtgcagcattaaatcataactgcatgaaatgaacagtaatacatatgtactactgtaataattttgtaaccacctgctgctgctattgtggtgagctcaagtgttgtgagtatctgcttaaaatgccttgtgatgctaatcatctccacatgagcaatttcatctctccagtaaattgtgtatagcaataaaaagtgatgtgtcaacgttcttgcatttttcattgcatttagtgcaatactgtaaaccttgaaagcaccatgggacccatacaaagtgccagtagtaatgcttgaagtgctcccaagaaacagagaaaagtcacgacattacaggaaaaagttggcttgcttgatatgtaccatagattgagatctgcagccgtggttgcctaccatttcagatagaagtttcaccttgacaacagatgacatacacttatgatatcgataaatacaatacagttctatgaatgaattttctcttccttatgattttcttaataccattttttctctagcttactttattgtaagaatagagtgtgtttatatatatatatacacatatatatcatataaaatatgtgttaatcgattgtatatgttaccagtaaggcttctggtcaacagcaggctataagtagttaactttttggggagccaaaagttatatgcagatttctgcattgtttgagtgtcaactgtatatatgaaaaaggggatgatcttttccgtgaagccactgcctatattgcatttcatctgggctcccattacacttctaggaaacctttctttgataaattttacagtagaatctcatggttaaaagcacaggatttgaagccagactgtctggttcaaattctggttacaccacttagtgaatgacattaagcaaattattcagcttttctgtaacttaggttttttccatgtgtaaaatggagataataagagaacctccttgataggactattgtggaaattaaatgacttaaatgtgtaaagtgccaagcacaacatctggcacaaagtaagcactttgtaggtagatactatttattattattattattattattattattattattattattattatttgagatggagtcttgctctgtcacccagacgggagtagagtggcacgatctaggctcaccacaacctctgcctcctggcttcaagcaatccccctgcctcagcctcccaagtagctggaactacaggcatacatcaccacacccagctaatttttgtatttttttttttagtaaagatgaggtttcacaatgttggccaggctgtacttggactccttacctcaagtgatccgcccgcctcgacctcccaaagtgctgggattacaggtgtgagccaccgtgcccagccaatactatcattattgaattaccttctgcttgtttctgagcttcatgaaagaggctatgcatttatttatttaatttaaaaatgtttaattaagaaagattgaatatattcaaggtgtacaatgtgtacaatgtgatgattagatatacatatacagtgtgtagtggttaccacaattaaactaacacatccatccccacccatgctgtaccctagatcatcaaacatattcattataactgaaagtttatatcctttgactaacacctactcattttccccacccactagcctttgaagaatgccactgtattatctgcttctatgagctcagcatttttagatttcacatacaggcataccttttttttttttttttttactttaagttcttggatacatgtgcagaatgtgcatgtttgttacataagtatacatgtgccatggtggtttgctgcacccatcaacccaatcagctaggttttaaaccctgcatgcattaggtgtttgtcctaatgctctccctccccttgttccctacctgccaacaggcctggtgtgtaatgttcccctccctgtgtccatgtgttctcactgctcaactcccacttatgagtgagaacatgtggtatttggttttctgttcttgtgttagtttgctgagaatgatggtacccagcttcatccctgtccctgcagaggatatgaactcattcttttttatgactgcatagtattccatggtgtgtacgtgccacattttctttatgtagtctatcattgatgggcatttgatttggttccaagtctttgttattgtgaatagtactgtaataaacattcacgtgcatgtgtctttatagcagaatgatttataatcctttgggtatatactcagtaatgggattactgggtcaaatggtatttctggttctagatccttgaggaaccaccacactgccttccacaatagttgaattaatttacactcccaccaaaacagtgtaaaagtgttcctatttttccacatcctcaccagcgtctgttttcctgactttttaatgatcaccattctaactggcgtgagatggtgtctcgttgtggttttgatttgcatttctctatcaacaagtgatgatgagcttttttttcccacatgtttcttagccgcataaatgtcttcttttgagaagtgtctattcatatcctttgcccactttttgatggggtttttttcttgtaaatttgtttaaattccttgtagattctggatattagacctttgtcagatggatagattgcaaaatttttctcccattctgtaggttgcctgttcactctgatgatagtttcctttgctgagcagaagctctttagtttaattagatcccatttgtcagttttggcttttgttgcagttgcttttggtgtaccatgttttattgcgcctcacaggtactgtgtttcttacaaattgcatttttgtgagaactctatttcaagtcggtgggtgctgtttttccaacatcatgtgtttactttgtatctctgtttaacattttggtaattctcacaatatttcaaaagtttttattattacatctcttatggtgacctgtgatcagtgatctttgatattattattataattgttttggagcattataaacctcatctatataagatgggaaacttaataaattttgtgtgtgttctgacttctccaccaacctgctattctcccatctctctttctctctttgggcctccgtattctgtaagccatcacaatattgaaataaggttaattaataaccctacaatgacttctaagtgttcaattgaaaggaagaatcactttaagtcaaaagcttagtaaggaagccatgttgaaagctgagacagggcgaaagctaagcctcttgtgccagctagccaacttgtgaaagcaaaggaaaagttcttaaagaaaattaaaagtgctactccagtgaacacacaaatgatgagaaagtgaaacagtcttattgcttataaagttttgattcatctgtatagaagatcaaaccagtcacaacattcctttataccaaagcctaatccagagcgaagccctgctctcttcaattctatgaaggctgatagtggagaggaagctgcagaggttggttcatgaggtttaagaaaaaaggccatctccataacataaaagtgcaaggtgagcagcaaatgctgatatagaagcttcagcaagttatcccaaagatctaactaagatcattgatgaaggtggccatgctaaataacagattttcagtgtaggtcaatcagccttctcttggaagaggatgtcatctagaaattcatagccagaaagaagtcaatgcctggcctcaaagcttcaaaagacagtctgactctcttgttaggggctaatgcagctagtgactttaaattgaagccaatgctcattgactattctgaaaaccctagggctcttaagaattatgctaaatctagtctgtcagtgcaaacaatgcctagttgatatcatatttgtttatagcatgatttactgaatattttcagcccagtgttgagacctactgctcagaaaagaagatagttttcaaaacattaatgctcattgaaaatatacctggtcacccaaaagatctgatgaagatatacaaggactttaatgttgttttcttgactgctaacataacatctgttcttcagcccatggatcaagcagtattttgactttcaagtcttactatttaagaaatatattttattttactttatgtttttgagacagtctcactgtgatatccaggctggagtgcagtggcacaatctgggctcaccacaacctccacctcctgggttcaagcgattctcatgcctcagcctcctgagtagctgggattgcaggtatgcaccaccatgcccaggtaatttttttctatttttagtagagacagggtttcactgtgttggccaggcctgtctcaaactcctggcctcaagtgatccacctgccttggcctcccaaaatactgggattacaggcatgagccatgtacccagccaagaaatgtattttataaggctatagctgccatagattgtgattcttcttatggatccaggcaaaggaaattgaacaccttctgaaaaaaattcaccattctagatgccattaagaacattcacgattaatggaaggagcccaaaatataaacattaacagaagtttggcagaaattgattccaaccctcatggatgaatttaaagggttcaagacttcagtggaggaagtaactgtaaatgtggtaaaaatagcaagagatctagaattagaaagtagagcctgaggatgtgactgaattgctgtaattccataatcaaatttgaatggaggaagagtaccttcttatggatgatcaaagaaagtggtttcttgagatagaatctacttctgttgaaggtgctgtgaacattattgaaatgacaacaaaggatttagaatattatataaacttagttaataaggcagcagcagggcttgaaaggattgactccaattttgaaagaagttctattctgggcaaaatgctattaaacagcataacatgttacagagaaatctttcataaaaggatatgtcaatcaatgccgtactttattgttgtctcgtttatgaaattgccacacaattccaaccttcagcaaccgccactctgatcagtcagcagccatcaacattgaggcaagaccctccactagccaaaagattatgatttgctgaagcctcagatgataattagcattttaagcaataaaatatttttaaaataaattatgcactttcttagacataatgctgctatacacttagtagactattatagagtataaaactaacttttatgtgggaaaccagaatatttgtgtgactcactgtattgtgatattcagtgtattgtggtgatttggaactggacctgcaatgtttacaaggtatgcctgtgtaagtgagaacataatggtatttgtctttctgtgcctgacttattttacatagcattatgtcccctgagttcatccgcgttgttgcaagtgacgagttttctttttttaatgtttgaataatattccattgtatatatgtacctcaatttctttacttattcttctgtccatggacacttaggttgttttcatagcttccctattgtaaataatgctacaatggaaaaggaggaatagatatctccccaaaatatttattttattttttagatatatacccaaagtgggattgctggttcatatggtagctctgttttaaatttttaaaggaacctctgtactgttttcagtaatagctgttctagtacattcccaccaacagtgtacaaggattcattttctccacaccctttgcaacacttatgtcttctattatttctcctcctcctccctcctccttcttcttcttcctcttcctctttttcgtcctcttcttcctcttcttcctcctcctcctcctcctcttctttttcttctttttcttttttcttaaacagagatgagatcttgctatattgcctaggctggtctgaaactcctgggctgacacaatcctcccacttcagccttctgcatagctgggattacaggcatgagctactcacctagcttcttgtctttttcatagcagctatcttaataggtgtgaggtgatatttcattgcagttttaatttgcatttctctaatgattattaatgttgagcatcttttcatgtacctgttagacatttgtctattttctttggaaatacgtctattcagagcctttccttgttttttcaaaactttttatttgacaaaaaattttatatatttattttgtataacatattgtttgtaatacacatacatcatggaatggttaaattgagctaattaacatatgcattacttcacatattttgcagtgagaacacaaattctactttttatggagttttcaagggtagaatacattttattaactatatcaccatgttttacaataaacatcttaaaatttaatcttcctgtctaaaattttgaatcccctcaccaacatctccccaactgctccccacatccttcgtttcccaagtattccagcccctggtgtaaccaccattgtactctctacctccatgagttcaactcttgtagattccacatataactgagtttatgaggtattttttttgtgcctgccttatttcacttaatgtcctccatgttcatccatgttattgcaaatgacagaatttccttagaatagtactctactgtatgtactattcagcctccatatatatatatggagctctctctatgtgatatataatctatatatgatattttatatatatagaatcatatatatagatatatacatatcacattttcttcatccatttcatccattgacagacacttaggctgattccatatcttcactattgtgaataatgctgcaatgaacatgacagtgcagatatctatttaataaactgatttcattcctttggaaatacacctagtagtgatttgttggatcatatggtagttctatttttaattttttgagaaacctccctactgttttctgtaatggttacactaatttacattcccacgaactatgtacaaaagtttcatttttccacatttctgacagcatttatctttcatttttgataatagatattctaaaaggtgtgtagtgatacctcattatgattttaatttgtatttctctgaggattagtgatgttgaacattttttcatatacctattgaacatctgtatatcttcttttggaaatgcctattcaggtcttttgtccattttttaattggattcttcattttcttactatttagttgtatgaatttctcatataatttgaatattagatatgtggtttgcagatgttttctctcattacatgttgccttttcattttgttgactctttcctttgctgtgtagaagctttttagtttgatacagtcccacttggtattgtttgctcttcttgcctgtgctcttggtgttctagccaaaaaaccattgtcaagaccaatgtcaaggagattttctccatgtttttttcctaggcttttaatggtttcaagtcttacatttagatcttcaatccattttgagttgatttttgtgtatggtgtaagataaagggcaaatgtctttctcatgtagatagtgtttcaaatgtaatttataaaagagactttctttccttattgttgagtatcagttgaccatatatgaatgggtttatttctgggttctctatttagttccatcagggggctgtacctttaatgcgttgaaactctagagcctagcgtagacctagagtataggagaagtaaacaaatctgatgaagaaaagaaagtctagttaaatgaagcattgtctaatactatacacccccttccccacatacataccttaaggcaagatacaatttgcttaatgaacactctcatgccattatagtagtcatcttgtttccagctggcttacaacttggactcctctctgaaattctgaaagtcagtgtagaaactttagccttatttaaaaaaaaatacttgtacacaataatagctatagtctttttgtggaggtgaaagttaatctacctttgtttctctggtgagccatggtaggttcctgagccaggggagcattgtaataataacagtgttttaggatttcttttttcattagacatttaaaaaaaaatagagatagggttttgccatgttgcccaggctagtcttgaattcctggactcaagcgatctgcccacctttccctctcaaattgctaggattacaggcatgagctgcgatacccagccaggaatatttatgtagtaaatatgtagaaagtagattgtcttgaagagagagcagctataaggtggccaggtaggcatgaggtaaaaaggactaggaccccagtgagcattttgtctacctttgtggtagacatggcagataccaggtatatattaaaactattgaataaggaggaccattgaaaataacatgtgaagaattcacataatgctttttgaaaccagacttacagtatcttatattatctgtggctgtaactactcatgttcactttttcctttagcatgaattattagtaaaggcaaaacattctgcattctgagagttgacctaatgtggtgatcattttatgtgttaacttgactggaccacaaagtgcccaggttaaacatcattctcagcatttctatgagggtgttttaggttgagatttacctttaaattggtagactgagtaaggcagactactcttcctaatgttatgggcctcattcatacggttgacagcctgaataagacaaaatggctgaccttctccaaggaaagatttccccccaccttactgacttcaaactgggacattggcttttctctgccttctgatttgaactgaaaaataagctcttcctgagactcaaacttactgacctttggacaggaactagaccattagcactcctgggtctccagctggccaactcaccctgtagaccttgggatttgtcagtcaccataataatgtgagccattctttatatcaaattgtatttattataaggaattggcttattggttctgtttctctggagacccctgattaaaacacctatactatagatttttaaaatctactaggcaatttctctcaggtttacatggatattgaaacaaagagaaaaattcagatgttacttgcaagcatcttcctactaaataaattttccatgacattaaaattaatatcaaccatggcaattatgtgttctttcctctcttaaagtaatggtacttttatctaaaattcatttcatagtgatatatttaatgattacttgggtcttctttacttacattaattaggctttaacaaaccagacagcccataacataataaatagcttgaaattaatatagtgaaaactcattaaaaaaactcttggtttcttaatttactgctgctcctgaataaatatgctcagatatttttattttcttttagtgtgaatcatttcaacttaaagattagatgtttaaatattttgaggctctccaatgttttccaacagtgaaaaatcttaacagttttacatctcttaatgactatgagttcaaataacacattcatgataacctgttagtttaatatacatacatgttaacctatgtatattaacctaactttttaactgattacatattagtttcatatacgtccatacatatatatttgtttaggcctgtgcacaaatatatgtacacacacgtacacagataggcttgtccacacatagatctatgtatattctctctgtaattatttcagacaaacaaatatatttaagtggagataaaatgtttgtttagtgacttacatagctacttttcaatgtatggcaatcataacatcaacctcagccacaatggtattgatgattatgattataatgataaaacttgcatatgtaatgggcttagcaagtttgtgcagcaaggagattggcaagatggcccatggtatcctgcaatgctaggattatatttataagaatagcaagtcagctttccagatagtaattatagcaaagtaagcagacttcaacttatagtctcagggctactgattattggggaacctgcccccgatagtcatgtaggttcttttctattttccctaagcatcggccggattgagaaataaagggacagagtacaaaagagagaaattttaaagctgggcgtccaggggagacatcacatgtcagtaggttccgtgatgcccctcaagctgcaaaaccagcaagtttttattagggattttcaaaaggggagggagcgtacaaatagggtgtgggtcacagagatcacgtacttcacaaggtaatagactatcacaaggcaaatggaggcagggcgagatcacaggaccacaggacaggacggggtgaaattaaaattgctaatgaagtttcgggcaccattgtcattgataacatcttatcaggagacagggtttgagagcaaccagtctgttaaaaatttattgggcgggaatttcctcttcctaataagcctgggagtgctatgggagactggggcttatttcatccctacagctcgaccatagaagacagccagacccaagggtccatttcagagacctatcctcaggggcgcattctctttctcagggatgttccttgctgagaaaaagaattcagtgatatttctcccatttgcttttgaaagaagagaaatagggctctgttccgcccggctcactggtggtcagagtttaaggttatctcttttattccctgaacattgctgttatcctgttcttttatcgaggtgcccagatttcatattgttcaaacacacatgctctacaatttgtgcagttaacacaatcatcacagggtactgaggtgacatacatcctcctcaatttatgaaaatgatgggattaagagattaaagtaaagacaggcataggaaatcacaaggatattgattggggaagtgataagtgtccatgaaatcttcacaatttatgtttagagattgcagtaaagacaggcataagaaattataaaagtattaatttggggaactaataaatgtccatgaaatcttcacaattcacattcttctgccatggcttcaaccagtccctccattcggggtccctgacttcccccaacaactgatcagagttgaaagaatataggaaacatataataagagggttgtagacgtcctgacagtctgacttaatcatttgctggtagtataggtagacagaagtcgtccagttcttcctgggcctgaggaagtgttcgtgaatttgcaggtaaggacagggtctgtggttgtagggttaatagagggaatgtctgataggctttggtaacagccaacataagaaagaggtgctttggtggccaggtgtggtggcttaagcctataatctcagcacgctggggggccaaggctggaggattgcttgagcccaagagtttgagaccagactgggcaacatagcaagactctgtctcaagaaaaaaattttaaaaattagccaggtatggcagagcacacctgtagtcctagacacttgaaagattgaggcaagagggtcgctcaaggccaggagtttgaggctgcagtgagctgtgatcataccactgcacttcagcctgagtgataaagacgagacctcgtataaaaaacgaaaaaggtgcttggatgcactgtgctctgaggttttgtttctgactcttatgttaaaacgtcttgaccctaggacctggtttagatgaggatttccatggaaaactgactgttcctttgcagattcttatttataaaactctccttgtcaaagtcttttgtctggtttgcatctcaactttgacttgtgcaaccaaagatacccaaaaacaaaacgaaaacaaactcttgatgcttcaaacatatgtttattctatcctattcgtctctgttttaatgaattacagcacatctaccttctgatctagctgaaagccaagaatttaattcctccttttcctcacccctgctagtactactgacatagtcctatactaatcttcctgctttaattccttttctgcaaggcatctagtctaatattcttaaaactagatcatgcctgattgaaactcctcaatgaattcccaatatactaggaaaaatctgaacttgtctctcactgacatggccctaatcagactcccacagtgtctcattttccgcattcccacctcttcattcctccagcaacagtgactttattcttgtggcttgaacgtgccaagtcttttcccagccttgaccctgtacgcttgctattttctcggtctggaattctcttccccttatttgccacatgactccttttcattctttaggtctttatcacttagcattctgtgacagataacagaaaccactccattttaatcagaagggaacttaacatggtaagttagtgcttacaattttttagaaggtcttgggaatagctcttgatgtggaactattccagactccaagaacaccaccacagaactggccctctacatctgcctcatcaggaagctggggagttagaagactgctgtcccaactgctggcttcagggttgtactactataaccatgagtaggggatcaggaagtggggtcagaaccattaccttcaggaacacatcttatgtgctgtctgacaataaggagactggacttctgtgccagtgaagtagacaccttctctgccactgcgtcgtccttctacagtttagttctgaatcagtgcttcgcatgagtatatctggttgtctgtgtctaaatccagatccctagctgcggaggaggatatgaaacatagcttttagctttccagtttctggagtacaagaaggtatgcaaaatgaggttgaaacagatgatggtctgccagaaggcctcccctcattacacctgtccatcccatgaaatcctattatatcatcctctttattcccataatagcagttattgtaatctctatcctttttaatttgtttttcatttgtatactgtgtgagtcttccactgctggactgtaagctccacaaggcaaggggctttcctcacttatgcaggacttggcatgtgcgaatgctagcacaaatgtgttgctgaattgagttgaataaatgaataaatagagcctgcttattatttctatattcactaaacgacactcattggtctctgacaagattcccttttagttggggtgaccaaataacttgttgttcaaatagggacacttcggagaaagaaatgggtagcatgattaataattatactaagacagaaggcatgacatggggctgtctaaagcaaaccaggcatatagtcattaactcattataatcactattctctgacagacttatcttcttaggttgccgaagagggatccagatgtctctaccctggccaactctttttactccttcattttccagtagttgggtaagaattttggttgcatggactataacaatagttttatacttcttgtaggatttctaaaactaaaaaaaaattctcacaatattttactatctagactatttgaacttgattctagatcttgtaacaaaaatcaaaagcagggttctagtgtatggttttccaatgtcattttaagtaggttactcagcaatcactgggagagtttactagaaacagatttttaaaaacatctctcttggagctactgatttctttagaggagctcaagaatccattccttgtaaaactaccagtgagtatggcgcatggttagatttaagaaccatgagataagaagcgtctgagccctcttctatatttggtacaaggattaataagtacttttaacatatataatcattggcattaactacgataaaagctgtaaatgactcagcagtgggaactgacaggctactgtgctccagcgtgcaggatgtctgtgtgatgtgatgcatgtgtttgcaatacaaggcagcccacccccaaccttccgggcctgcagctgagatcaactgtgactaacctgattccaaaactagctgactcatttcattgcttcctgtttctcttattatactttgaagtgttttcagtgaagagcctagcactctgcccagtgtactgtaagtgcttggtaattattggttatatatatatacacacatatatatatacatttattaaaagaaggaaggaagaaaagaaggaatggaagagaaggggagagggagggaaggaaggagggatcaagtaatgaggcaatatggtaaatatagtagagaaacaaatttactgttctttatcaggatgcaattttaggaatttaggatttaggaacataaacacaaagtatcttgggaacaggacaaaattatgtcctctgttgtttcagatgacttgttaaaaactgaaattttgttgcactggtttttacacatctgagtgctaaggtaactgcttgtttgactgaatgtaacttaaaaatatatgtaatggacattttttatttctttaaatggtgtaacaggttgatgtgagaatggacctgctcagggtgaactaaattgggactggagtcccaatttatcaccctcatcaaattatgtaatttatttctttcaaaatattaaactttaaaatacagattataataacatttattttaggattatgagaatatgagaatcaagtgagctaatgaatgagaatcattgttttgagaatcaagtgagctaatgaatgagaaagttctaggaaatattttaaagtgagattaaaaaagattacttgcccttttcactgaaacaggttttcttaaaaatcaatcattaataactagaatatagaggcatgctgtattcaaatctgttgcagtcttcagccttattttcattatattgagttcttgatttcttgatatattttgcgtccaacatggtttctttcagataccagtatctgaaagagctttttaatgaaatagatttttaatattcattcattgtctagatattgtgaaattgctgttgttctataccaatcttagacataatacaacctgcagttactgatgtgaaattgaatggagaaacttcattctgtaaagttgaatcagtgattaaaataaccctatgaactatctgaacagtgtgtgtgccttggttctggttttcttctatctaattgtagtcccaatatcagttaacatcctccatctccctgtgcagtgatgcttacttactctgaacagatgttatagtgactggaaaaaaatcagtttatccatcaatagacctagatctcatatctcctaaaaatgtactttccatcattctcttttgagccagtatttattattgtcccaaaaaatgtgcattgcaactggagagatgcagccagcttaggcaagcatgcctctagtgggcttagggcatttctgggccactctgtctctttatctggaggctggaaatgattgtttgacacacaccaaagggagaacttcatcagacactgaaaatggtaccttgtagcctgcaaaaaaatacttcccattgctccaggggtggagaaaagtaaagatgcagaaacataaaagtcaaaatcaaaatgtaatagaaaaatgaaagaggaaatagaagaggaaggtgataaaaataatgtatgaactgcttttttatttagcagtcttatcaaaatcacaggggatttttttgtctgtcagagtctcaaatccttaggcatctcatgaaatatcatgaattttcaatgtgctttaaattttacatttttgaaagcaagagaattttcttacatactgcatcagtccagcagataaaaactagcacaacagaactcttataaacttatttttgtcgaattcacttcttataaaagcagtatagttacaattgagggaaataatggaaaatggctttgctgtgaattttgatggctttgttgaatctttaaatctaacctcattccgtctatcattagtcttttcctttcatgcctttgatggcaatcgtgttttacagatgaacccattaattcactgggaggttaagtgattagctctgcctggcagtcaggtgcagggttaagattagataaaagtccctcagggtctagtgattgctaaactttgaggacagtgaccctccttattataaaaccagacattcagaaattatctaacagcttctttcaccacattccaaagaaagtttatttacctttacagagaaagtgcctatgatggttttaaaagccaggttgctagaaagacactttctcctcagaagctaatataatttagagagaatttcttgagagaaatataaatgtatttcaatttatgcattgcctacataattaataataaagtaagtatttttttggcttgttaatattccaggcaccccaacaagctctattggggttacgaaggtatgcaactcttagaaccaacccacactgagtcattcattgttttgttgcttcattcattcatgacagacaattcatttatgacagttgttaaatttatgaaaaaatagcttgattaggaaaggtttcacggtctagattgtatcagatggataaaatgttaacaggcacagaagtgtgagtcattccaggtataggaaataacatgacaatctccctcctaaataaatctctgtggtagaaagacatagtaacatttaatgagtagcacacatgcactgatatgcctagagcattttgtaatatgtggaaagtaattttaatataagttaaatatttataaaatacatatttaaaagataagcatcattttttcttcaattttgtgattcatctagttttctgtaaatggtagaaaatagaacaattctattatattccaatccttcctccacaaccctctcaataaaattataacaaagaacaagccactacataattccccttccacttactgtagaagaagaacaactcttaatattaattgtgagggtttcaccagagtattgtctaattaaagatgaccagagaagcggcagcctcagagactcctttaatttgacatcctgaatacgtagcatgtttaagagtagttctcaggggtagttccacaatctattccatttgtataaacctccagaacttcactgagacaataggagtatgtaaaggaataacttgcttccatgaagaacaaatatttactgcatttgcttgcattgtttctcaactttttagtaaatattttatttctgaaatgaaagaactgttttgtgcaaaaattccttcaagatgcagatttcagtgaacttggggttccagccattgcagccttgagtataatttccacctgaaggttgaagagatgtgagcaacacttaggcaccccttctatattttcagcaaatagtgtttttaatgcttctttgttcttcccttgttaaatcttcagattagtaactgctgattaatgccccaaagagaagggattacaggcagataagtattgcatactaatttccttaaatttggggatgggcagaaatatggaaagatgtgagtaaatgttataaacatttcaaaagaaaaaaaaatgacccacaatggggagatgtgttaatgtgttgtccaggcaataaaagtgcattactttccttcttttattgtgtatatttaaggcatacaacatgatgctttgataaatgtatattacatatatatttagtgaaatatactaaggtcaagcacattaacatatccatcatgtcacgtaattaccttcttttttattttttggtggtaacagcacctaaaatctgctgtcttagccagtttctagtatataatacaaaattattagctgtagtcctcatgctgtacattagctcttgagacttacttatttcagttgtttatgtaactgcaactttgtacccattgacgtgcatttctccattccccatcccctccttgtccctgataaccactgttgtactatctttttctatgggcttgactttttttttttttttttaattccacacataagtgagaacatacagtatttgtctttctgtgcctggcttatttcacttagcataatgtcttccaggtttgtccattttgtcacaaattgcagaattttctttttttttttaaaggctgaacagtattctcttttgtatatattatgcattttctttatccattcatcccttgagggacacttaggttgctttcatatcttggctattgtgaatagtgctgcaacgaacattggcgtgcggatatttctacaaggtgctgatttcacttccttttgggtgtataaccagaagagggattgctgggtcatatggtttcacttcctgggtggaagccccccagttttgaaggcctgtattcagtaaactgtctacaataatcccatctgagcctccttttcttcagcctctgtctgtctttgttttggcatctatcttctctgatttgttccttcccacgtcccttctccattgccagttccttttagcctcagcaaataaacatgttccagtttcttatttcatgagagaaaagtaaaaataaataaataaaaacacaacctttaaaccttctgcctctctctcagtaatagttccttaaagaaaggaggcttccatgtgttaccactgcgtcattatcctcagcaaactaacacaggaacagaaaatcaaagaccgcatgttctcacttgtaagtgggagctgaacgatgagaacagatggatacagggaggggaacaacacacactggggcctgtcaggagtagggggcagggaaagagagagcatcaatatcaaatagctaatacatgcggggcttaatacctaggtgatgggttgataggtgcagcaaaccaccatgacagacgtttacctgtgtaacaaacctgcacatcctacttatgtatcccagacttaaaataaaatgcattttttcaaagagtttttgtttcttaaattttgcatccaattccatgcatcactcacttcaccctagtcccagccctgtgtatccacttgtgcatttcacaggtaactcaagctatttgtattctaccttcaatcaagccttctttcacactgttactccctgcttctgtgaacgtcatcacattttacctggttgtaaaagccagaaagctgggttgccttcacccttttctttatccctgtctctccaaccttataatcagtgatcatatgttgcctcttatggctctttaatatctttcttcagaaacactctctctacttaagaccctcctcatttctttcctgaatggccaagaattgtcctctaactattcttttgtgctaatgtgtcccccgccccatccttctctgttttttacgtaattgtggccagagaaatttttctaaaatgcaaatctgatcatacatccttgactacttaaagtctttcaatacctttttattggcttagcataaagtccaaaatccttagcaagccgaataaaaaccttaatcatctggacctcctaagcccttcattttacttaattgtcactgaccaattaagacctttgctgaaatacttgcagggaggtaaataggttatttctcacagcattgggccttctaatatgctttcttctgcctgagattctcttcctgtaaaactcaattcatagggcacattatccaggaattcttcttgatgtttacagtttcagctaggcagtcattccatctactccttgtaattcagtacttccgtttcatagctgatactgtttcctggtcagcctggtctccatgctatgagctatttggaaacagggaccatatattttaatcttatgtctctagtacattatacagttcttggaagaaagtaggtatttccaaatgatagaagatatcagtatggaatattattcttttctcattttcttcataataataacagaattccctttaaaaatgttttaatatattactaatttagtattttgatggatcaagatttggctatctgcctagaaatagtttttctcgaatataggcatctcagtccctcccatctctattcctcctctgttggaaaagccacccatcaatgcaatcctagtacaaactgagatgcttaaaaatcatgatattttattccgaggatatctatgaggcaagactggggatgcagggaaagagtagtttaacaactgacaggaccacttacattctgtttctccattcttaagctcagacccccagatacatgttagaatcaaggcatgagaccattgttgttggccacattaaatgcctctggctggacttggagctgaacaagaattgcatggacatctagtccagacaaggagcctcaagagacaaacgtatctcaaggttctgactgacctagactaatataatttaatagcaaatgcatgaaagcgtcattaaatgtaactagttttgcctaagcagaacccagaggagaaatgtagatctaaaataagacttagtatatttcaacactcaagagctttcttgatcactttaaggcatgctaacaattttccatatgtataacagttataaggcaattaatggaatattttgcaaatcaattgcaaaaaagagaagaaaaaaattgagtaagtaacagctgaagtaaaaaatgaaactgctataaatatagataatagcttccattaaaagtgtcttccaacattggaaagtttaatcacagttacactcaaatcattggttacactctatttcacagttatccagcttgggaaaatctatgcactattaaacatgataggttcaatgttttttataatatctggtcagcagtggaaaattttgttagctaatttcattaacaagtttcagtttcatttaattctaacaataataattaaaaagcaagtactatgttttagatggtgcatgtctaatctgtagagggggaggaatttttctaaatgtagaggaattgagtcagaatcacatagggaaatataaatagacctaactatttatatttagttaataaatataactatatatagtttagtttgttttcttataaataaataagaaaaacatagttgggagaaatatttgcctcaaatataagagaaacgtttaatacgttgaatatttataatggtcatacaaatttctaatgacctatcttaaaaaatcttaaaatagcaatttacaaagggcatattccaacaatttatgaaagaaactacatttgactgatacatttatgaaaatgattaagacttagatgtaataaatgaaacataacttgagacatatttttcatcttttgaaatagaaaatactttgagaagaaatattttggattgataagaaggcacagagatcagactactattttatatgcccagcaaaagattaaacaaactataaaacaaagaaaactgtctagaaaataattcggcaaaatattttcttcttgctctttggttcagaaacactacttccaagaattttaccctaagaagtaatgtaaaacttttagaaaaagtatttgtacctattttaaaagctttttatgttagaaaacaaaggatatataaatgtcaatagattggaatataatacaggcattaatattgttgcttataataatttaacaaaatgagaccatgctaatacacataaactgcaaagcacctacatgctgtaatgtattgtacttatatacaccaaaacactgaaagaagaatgctaattcattacaatgatcatctgtggttgccagtcttattgttaattattattgttttcttgtatttttaaaatatatttttgatttttcataaggagcatttattattttcataatcagaaaaaagcatttctaataaaagaaatttggttggaaatgtatcacaaaggaataataatgttagtataacactgcctattacccactaacctcaagcaaattagtagattctttgtacccatgttgacaatttggtttcccgtcttgccatttgttattccagtgaatgactgctgtgatctttagaggaggtgacatatccagttaatcttagtgaagtttgaggcgattagtttgttattcactcttccagccaactttttcctattgagggtttggagagtgaagtggggtgaaggcaacaccattcttattgctaaaataatttaataaggatagttatataaacaaagcattaagctgtgaagagaaattgcccataaagtataacctactaattttctgatcctccttctgttttacaagattgatatttggaaggtgattattttactctttcaggatttgacctttgataggaatcaactccctaaggaatagtttggttaaactaaaccttaactgaattccaagttagtaaggaactcatcctcaatagggaagagaaaaaattgcagtgttttatttttttttccagtcagaacagtgtataactacattctacagttaagcaatattagatgtagtctttgggattctgatatattctcagtttactgcttagtgctgtagtatttttccattatgtgctgctgcaagaattcaatcttcccaggatggcatattgaacacaccttccatgtggagagtaatgccatgtcctgaagatagtcccctccattctcaacatttttaacacacatcatctaatgttgacatcaaggacatggagagggccttagtcatcactgtccttggtgggggacacttagagtactttgggactcaacctcaggcatttcctcatcattctttgtcactctcattctatagcaagtcagcatatctgctactgttccagagtttgacccaattatagtagaatttcaaaggttgtggtatcaaaattaaaattctggtactcaagaatgtgtttataactttagtgatacacatagaactaactgttggatggagaaagttcgttagcccactcacttctgtgtcaaggtctttattataggaaaagcttaattcccattgtgaatgggcaacattttcttttctattcctggctttcccctccagttctctttcttttcagcatgtttccctctccttcagaattccaaagctctgatcttccctccatcctaccctaaacttgccattgagaaagaactccatacagtccttcatgctcagacctaaatgtaagtttacaatgaggtttctgtcattctttgtgtcatttgcatttaaaagggcccgaagatctaggtagtctaccaggattaaattctcactgagtagaattccttgagtgagcagatctgtcaggtgtattttaggggttggtgtctctttcacccagccagctacgtttgtaattaagggcaacactgaagtttatctgctccactcttaccctcctgcttgcatgcttactttcatccttgtgggggccccagtattatgccttcaggtgggcccaaacagactctcattcctccaatattgtcttaactcattactaaagtgttggttcttctggccagctctaatgataacagcaacggcctgtctggagtggctgttgccatgacactggctgcagtaggggaggtgtggccagggctgagccctctcaggaacagatggaagccctgcccccttccaagttggaggggcaggaacctcactcccccaggcaccactgcagcgacctagctgcggctgcggactcaggcatctctgcacttttgggggcctgggaagcccctttgcccctgcaggatcagaagtacctgctccctctgcctggcctctccccactcccggtgcctgctctgatttcagagcaaagttaaggctgagcccaggcactgtcgcaacctggccaggtgcatgcatgcacacttggggcagcactaacacaccagccccctgccaccttagccccctctggactttgggcactgaccagcatgagagggaggccaagaaggggctaagggcagctcagtgttggcttgcaggcaccccttggcatgaatagcctggacgccatgggcactgtaaatggcaggttaatgacaatgggaggcagacaggctcctgggtggaaaggggcagttccccggtgaaaccccgccttcaggccagttctgcagataggagtgagaacttgccgtgctttttctgggcccacccatggctgcccatggaccaatcagcattcactacctcccctctgaagcccataaaaaccctggattcaagcgactcaggcaaatgatgagctgaccatcatttggtcagagaggagctacacattatgggtctcctctttgctgagagctgagcagacaatgggatgccctgcctgcagagaaaagctacccactgcaggtctcctctgagttgtttagtaaagcaccctttgccttgctcacccttcacttgtctgcgtacctcattcttcctggatgtgggacaagaactggagacccaccaaatggtggggctgaaagagctgtaacacacacagggccaaaacacaccccttgctcaccatgttgtggtctactagaagcagagaagagctgcggccctttggggagcccagaccaaggaactccctgagccagggatgtgacacactcttggggctctgcggttcctggtgtcttcaagcttctgggcaccactgcgttccccagtgccagccgtggaaactgcttgtggtatgcctggttcagctacagccttgcagggaggtggcacccatgcaggtgcctggagctgcccaccccgccacagccagcgtgcctggctgtgcacagttgctggatcccacgcttgcttgctcacatacccctcaccactccgtgcctgccttgcccttggcatgcgtgggaaccaggccagtagcgcgagctgagcgcagcctgccaggccgagtgggcataatgagcctagcgggcccgagcaaaactcaggcaaaggcgccatcagccacagaggttttcagccagaaaagcaacactccaaggatcctgtgacactagtagcagtaggaataaaatcagaagcaattcccagctccaacacaagaagtttagccctggaaaccttagtttgctttgactactttatttacacacagtttatcttttatgtcatcctcgggccaacttccttataatctgctctatagagaatctcccactttacagcttaaacacaggaaaacagaccctccccgccagaacgtatttattcagtccaactactgtaatagaaacatatagcctctctgagtccagtagcataagaacaattttacccatggtcatgcagaagcttctgcttatatatttgttatatacataaactgtatatgtatatataaacataattaaaatagctattgggtcattattacaagtgaaaatgcaatctacaattgttgatgagataaattggcagagtatatctgcttctggccagtccctctcattccgcaaatctcttttggaaaatcctttccagccaccccctagatcccaaccttctcacccctgacacacatacactctactggcagtcttcagttatctagtgaatgatttttttgagatcagcgccataacattatcattcagttgagaaattgaggctactcagctttcattattttagccataagtacattttcttctattagccatgtaaaataggcccagtgctaaaacattttaaatatattatcttgctcagccttcacaataacttattgttgttggcataattcctcttttacagatgaggataccgaggctaagaatggttgttgcttgtctcaagttaccattgtgcacagggctcaagacaaattccacagaatcatttggttaaggaacaggctttattgggggaaatttataggctggtgtcagcaagagaggcacacattcctgaagcctcttggcctcccacagagaggtaagccagggccagtcccttgctggatacatagtgggtttatattacattaaagcaacattgcctgtgattggtctctgttcttatagagcaagaagaagagactctgcagacaggctatttgtataacaggtataattgtcagctgttttccagagttttctgaggaagccagctgctcaaaacctgggaagcttggaaccaatggaaagatgcagttgctcctttgcgggtgaataaagcactgtaacaccatcaaaaaaggtgtgaaccttttttttgtagaggaaaagcgagagctctcattgtgagttattttattgtccagggaactgagagaaagcattcccagccactttttgaaaagtctgcattacatgccatagacactgtgtgtctctgtgtgtgtgtgtgtgtgtgtgtgtgtgtcagaaagagagagagagaaaatagggaaaggaggggcagaatttaaaccaagatctctgtgactctaaagctggtatgttatctatttcctataatacttgccaaacttctggtattttttgccttctatctgcaacttcctaaactcactctcattgccatctagctcagctctactccaccccaagacaactatacttctgttcactctttttataaaccactgggaatatttattctaagcgaaactatgtctctaaaccccagagacctcttttacctttccttaattatacttagggctctattcatcaccgacctcccttgaaaaatttctctagtcaagagtactgctctctcactcagctgcataaatagggcttcagaggactcagagtgcttttttgcatagagatccttgctcctttaatttcctgaaaaatatgaatgcatgtttccaatattcactttacccatctatgacatttttttgaattctcatccctcctacatttaattgacaactccttctctgtatttcttaataccctgaacatacgtatatgagagaacctggcacaaaggttttatttacatgtatcttctcctactggatatgagaattttatgggcattcagacagtgaaaaacaaagacacagaatgtgataggatatttgcaatatacataatgattgaaatgcttgtatatggtctagaatggctatttttttaaaaagcctacaaatcaatgagtattaaaaatacaacccaatagaaaaaatgagcttgtgatttgaacatggacttacttcaccaatacaaagaagaaaagttaaaatggtcctaataatctaggaaatgcaagttaggtccagtaatatggaaatgcaaatctaggtctattaatctaggaaatgcaagttaaagataagatagcaacatctgtctataagtatgactaaatttaaaggaaacagaatatcaggtcttggcaagagtctgaagctgtaggattcttgcacactgttgtgaggcatgtagtgtcctaaaccaccctgtaaaacagataggcaatatctactatgtttgaagacaggcataccagatgatctaccaattccattcttggttacatacttagtggaaatacacatccatttacaacaaggcataaataaaagcatatttgtagtagtaatgtgcataatagctaaagctagaaacaacccatatattcattaatactagaatagatacataagttatagtgtgtccatgcaatggaatgctattcagcaatgaaaataagtgaattacagataaccataacaatggagatacttctcacaagcaaactcaaaagtggcctagcagataaagttcaagtggagataaagtgatttcttttatgtaaagttagaaaaataacaggcaaaaactaaactaaaaggtttaggaatacactgttaggtgaaaatgattttaaaaaatcaagacaaagtttatcttaaaagtcagagtggctatcaagaggagagatttgtggttgggagctggtatagcggggcacatacatgtgtggtggggagtgacccccagatgtgccaaccgtattgcatctcctgacctgtgtggtggtcacgcagtgcttgttttgtaataattcactgagacatgtggtttggttttattcagttttctgtgtatgtattgtattttatattttaaaagcattataaaaagataaaaactggtagacgcaagctactggaattgtagggtgacaggcaccttgagagggacaagacaggtcaataattcctgggctggtttttcacatatctttggatagaaggaaatagtaatgttacaggatccgtggggtgtcgcttttctggctggaagcctctatggctggtggcacctttgcctgaattttcactgggcctgctgggctcattctgtccacttggcctggcagggtgcacttggcttacactactggcctggatcctatgcctccaagggagactgtgagtcaggcgtggagtggtgagtgtgagtgagtgtggggtctggccagtgtgcacagcaagacacactggctgctgctgctgcggggcaggcagttccaggtgccagtgtgggtgctggctctctgtgaggctacagctggaccaggaggactgcaaacagcttctccagctggcaccagcgaatgcagtagctcctggaagcttggagatgtcaggaacttcagggccccaaatagggagtcactgccctggctcagggagctcccagagctgggctccctgaagggccacagcttttctctccttctcttcacccacaacgtggcaagcaaggggcatgtttcagccctgtttctattacagcttttagccttgccattcagcaggtaccaaggtcttgtcctgagtccaggaagaatgaaatatgcagacaagtggagcgtgagcaagacaaagaggagctttactgagcaatagaacagcttagaagagactctcagtgggcagctcctctctgtagccagggcatcccagtgagtgttcatctctcagcagagagggtagctcctctctgcatttggtcatcccattgtctcctcaactttcagcagagaggagaccctggggtgggcagctcctctctgcagcttgtcatctggtcatctccccatcatctgtctgtcctctgcttgagtctggctgagtctgggggtttttatgggcctcagaggggaggaagtgcatgttgatcagtccatgggcacccacgagggcccagggaaaagcgctacgagttcaccttctggtatgcgggaatggctcccagcccccagggttcaggccctcctcagcttgaaggtagggcatcactgaggaccttcccccttctgcccaggagcctgtctgccgcctgtcaccattcatcgcacccagaccgttcatgccaaggggcgcctgcaggccagtaccccgctgtcctcagcaccccttgtgcctccctcctgtgcttgtccacagccaaagtttagagggagccgaggcagcaaggggttggtgggtcactgctgccctgagcatatgcccctggccaaactgcaacagtgctcaggcttggccccaaccttactccaagatcagagcatacactgacagtggggagaagccaggcagtggaagcaggcacctccaagcctgcaggggtcagaggggccttcctgggcccccaggaacacagagatgcctgggtccagagatggggcagagcagctgcagctgcacccagggagctcccacccagctaactcagagggggtgggtctcccgcttgtccagggctcttgcaggctccctgaagcatggtaccaccccaggcccggctccgcctcgagtcccctctctggtcacccctctgtgcccaaccacattgttcccctgcctgtaggcaacttggcccggccccatcatggtggcccccagggtggtaggctccagggggtcccccaggggaagtctctagggactattcgcctcttccccatgaactccccatagcagtggctgtcaagagtggcaagcggggccggggcctggagtgggtactgcccggctgcgtgaaggtgggggcagtgcagtcagcttccttggggacgcagggcacaggggtcccatggccaccactgctgccctgcagcctctcctgctgctaccacttgtgcctccttgctgtagcaggtgtaatggcaacagctgctctggatggcccaccgctgccatcagtaacacattaggccagatgctagtgcattgcttgcctctgagatcacactgtggaaggtaatgaaggatgacatgaaagtccatattttcagacttcaacaacttgtggctaagaaaataatacaaacaaaatacacagaacacaagatgtacgggctcccatctcctaaactagtagaaaatctagactttacccaggctttccttacccagataatccctagaatctgcagttttggtcacatttaatcctgagcctgtctgtcttgctacacatctatgacactgtgctggagagatgcaactccattatactccttcaagccagacttttcagaaggtgctcttgggtaggccacttactgcctccgatggagccctggtgccattgaagtcttacaggtctacagctatggtagataatcaaggccctttctcttgctaacctagtgcattccttgaggacacctctgtcccaagtgcagagctctgccactccccctgaaatttggtccatcaaagtgtgaaggaggatattctcttccagagagtcctgttacaaagacacaagttacagcaagaatcactgggagccgggtgtgataatacacaaagtgggccactttcctgaagctgagtccttggacccaagaggattctagcatcagccccagtctgctgtgactacagtagccttcctcttcaacagacagatgctaggttcagagtatcagcctacaccgcccactccatatacagtgatcgtgccctaagtatgattttttttctttctcacgttcttccttccatttatttccctgtcttccatcctctctacttctttccttcctgctcaccttcccttcatccacaaatatttacatgctagatattacgctaggcaatgtagagtacagtagtgaaaaaattcaacatgatccctctttcatggaggttactattgcctgcctttttggctttatttggggttatctaaaaacctcagaaatgttttaatgctatctcacacaaaagggagtgcagtccaaattcattctctcctgggagccttttaatctactattaactcatcactcatggatgaaaagagctatgggaaggaagacccacacatcatccaaagaccataagtctttccaacaaaagcaatcaatttccagactcctgtctggacaaaatatcttgtttatgtaacatatattatatgtaatgtatttaaacacctgattgaatattaagaaaagagcattggattttatttaattaatgcaatatatacttgaccttcagtaaggtttacatgtgaacaattaagtggagagatggagggaggggagaaagaaacacctaggagaaaaggataagggaaaattaaggaaaaagagaaaggctcactaggtctgaaatacttttgcactttatgttgtgagttgaagaatgtgatcaccttatctctgccctgtgaaaagctaatgaattgtttaacaagagtttcagctccttagcttctctcagcttgaaatatcagaggcttcattgggaatgagttagtcatagcaccaaacagagaagaaaatgagctaaggcaacagcacagacagaccaggttaatgtaaggctggttagatttaaactaaggccttgcctgggtactttttaatgccacaataattcaattatgttagggtggggagtaggaaacaattgtgggttcagcaaatgtagagaacaagtttctcacttgcgcaggtttccctgcctttccttcaccatttttctgactgctgtggtctgcttattcagtatatcctaccacaggggtcacacacttttttttgttttgttttgttttttttgagacagattcttgctctgtcgcccaggctggagtgcagtggcacgatctaggttcactgaaacctccacctcccaggttcaagcgattctcctgcctcagcctccagagcatctgggactacaggggcgtgccactatgcccagctaatttttgtatttttagtaaagacagggtttcaccatattggccaggctggtctcaaactcctgacctcgtgatccgcctgcctcgacctcccaaagtgctgggattacaggcgtgagccaccgcgcccagcccacacactttttctgtaaggagtcatataataaatatgttaagctttgcaggctagattatttcagttgcaactactgaacttttctgttgtagcctcaaaacagccatagacaataggtaaatgaatgggtgaggccgagtcgccagaaaactgtctttgctaaaatattggcaggcaaaaacagtgccgaccattctttgctgacccctgtcttagtgaataagagtgtaagctttacataggaaacaactgagttaaaattaaaactatcatctacaagatctgtaacctttgccaaggaacttaacctctctaagcagctgttttctcatctccaaattggggataataaagcctcccttatgatctcatgagaaataaatcagatggtttatgaaaattgcccaagacagtgcctgagatgtattatgtcttaaatagaggacagctgtcattattagttgctcactctccattcatgcattcagtcattcagatatttagagagtgcctattgtgtgtcagatatttagtacagtagggatataataatacataatttctatctctgatctaaagggactaaatagtatagaagggaaaataaacgtgtataagcatttatacggtaaggaatcagtgctaagaaaggtaccataattcagaaatgctttgggaactactaagggtatatacatttatctagtttagttttgaagtttcctggctttgaatgagactttttatatttagagaagttgctaatttatttctatatattgggttgggatggctcatcaaattcaagtaaaacatactcataaaggaggaggaattacccatgataattaaccgtaaataataaatacagtaaataagaaggaaacagccttcaaagtttaaagaatggattttctttttctggaaaacttgcctggatacataatcattgtcaattaaaagtatgtgtttagagaaggtgagatcattgaagctattgtgctcttgaatttatcaactgaaaaggatccttcttgtgtctgcctcttaaagcatgtatctagcaattgaaagtaaatacacctcagtgtgatgcctggaagtctgtgtacttgggaatgagacaaagtccctgctctgtcactggtgattgattcagtctgaaggagaaccctcaaatctccaagttgttgagtttcagcctggcttttgttttctctgatgaggaatagctccagggataataatgcatggatagtactttttctgtctggtttgcaatcttatgttaaaatgtcattgccaggaggtggccagtagctttggagtcatgaggaaagtaccttaggtagatttagctctcacgcacaccaacaacagtggcagctctcaggggattgtggagagtggaggatggaccactcttagaagggggtcagagctggtgaagaaatgctgctgccacagagcagaagagaacaacttttgctaaatcatgagatacctattgaggaatcctaaaataataggggggagttctagtgggctagctattctgcatcagtatatggggcaagaaagagaatgcagaaagggcaagaatgagtatgcagaaaatggggtctaataaatatagggattaaggagtcagagagctggctgcctaaccacttattttctctacctacttactgttctttcaaatatttctaaagtacttataagtatgttcctgaataacttcttattaaactctaaaaataaatgtattttggtttttcttgtttaaagcaatcacacaatggacaggggaaaggcggtagtgatacacaggtgaatacatacgtgtgtgtgaacagcaactaacaagggaaaattaatcacgtaaagagtaaccaaacacacacttcaggggcttctgaaaagcactgagggctttgctttattagaacgagtggtatctggataccaataaaagctggagaaaacaaatatttctgggaaaaccacaaaattagttattcttacattctcctaagcaaagcatgctactaataatgttagtcagcagtgcaccagggcagatagacaatgataaaatggttatattagtgacaaataggttacttacaggagttattaatctaaaactctccttccttacttggcattattaaatggattgtcttgtatgccactgagaggcaagacctaacaataagaaagaaataattggaaaaattcacacatttaatgtagaaatatactgcacttcttccactgtaatatgtattgcaaaacaaactttatataataataatttatttgctgcataaagggcattaaagatacctaactaaaaagcaagtctcaattatttagaaacttgaacatatgctaataattcttcttgatcaaagaaatgtgggttatatatttcaacactcttattgaaggttgagcaggctggtcaggcaggactagaggtgagcttatattctcacctcttcttgacagtcttctgtcaatgagattgacagttttctattcataatctcatagttcgtgcaccataaataactaccagttgggagcttgccatagcagagatatgccactcatgctataaggactttgacttcagttccatttgcgcatctcactcattgtgcaatctggggtgagcctcctatttattaagttccatcttcatcttttttttttttctgagatggagtcctgctctcttgcccaggctgccaggctggagtgcactggagcaatcttggctcactgcaacctccacctcctgggttcaagcgattttcctgcctcagcctcctgggtagctaggattacaggtgcctgccacctggcctggctcatttttctattttttagtagagatggggttttgccatgttggccaggctggtcttaaactcctgacctcaagtgatctgcccatctcatccttgcaaagtgctgggattacaagcatgagccaccacacccagcctattaagttccatctttaatgagaccctctgagaaaaatagcccttgcatctacagattgggtttcatcaccctattttatgttctttcagcatcttgtacttctcatgtatggtgattattataatttaattatttgctaattacagctgagtaatgtgggtcctaatcaacactatatttccagcttctaccttactatctggcatatggttgatgctccatttatatttgttgagtaaataaagttgtttcactctctaggcattagtgtttccatcagttagataagaacattatactaaaaggtctttatagagttcttccagcccttaaattctgtactaattttgttttaatgtatcttcatttaaaatcttatatcagaggaaattctagcttttaattatgaattgtttgtccatgcgtccaaaaataatagtagataaaatacacatgtgggaaagatttcctgcagtatgtacatttgatgcaataattttagacatgtaaaaatgaactgcaataatttaaaaatgggctagcagagcattctccattggaccacaagcttcttgaagggaggtactatgcttactcatcttttaaactgtagttctagcacataccctggaagatggcctacagtctttactgaattaataagggaggtcaagcgaaaaaaaatggtggcaaaatagaaataagcaatgcaatggaaagctttgttggcagaagcctgaggagcttgaaggaaaaatgggattagataaaggtactcaagtgggatgttttaatttcttattaatgatttacaagagttttagacaaagacatttctatacttaaaaacagtttccaaattaccagttacaatatttttatcatttaaatttaatacaatagagaggaccgagtgcttaattggagcaacctcccactcctcactgttagtcaattttggaaaattccatctcttcctgaaattaagatactgtatgcaactgtcaccgcaacctggatatctgtcaaaaagaaggaagtggcaagcacactgaagatgggtcctccaggcagctgagtaccacttaatggaaaactgtttacaaaataattttttttgacagagtacttctgagaagtgctcttagtttatcagaaagaggagagctgctgtttgaaaagtgctttaagtttggataaagatatttctcttaaaaaattctgcttcattgtaatttttcctctccttgccccccaaaagaatgtttcagaatcaacacatttctccttccaacttcacacaaatataacactcagtggcttttttatggatgaaagacgtgagctactcagcagttacaacatgaccaaagatacttcagaatcagattactccacggtattctttgttttctttgaatcaagaacactagtctatatctacttatcaactattaaacataaaccaggtatgtcttaaatataaaaaataaactgtaaagagtggaagtgtctttttttagatctgcgtaaatcctaaccttcagaagaagtttacaaagaaaaatgatcaaactccagtactaaatataaaatcttatttttttgagttttaaaaacatctattgtgaaattgagcacacatagagaaaattgaacaaaacattgatttaaagcttaattgatctgcactaagcgaacaccatcataactaccatcaggttaataagtagaatgttcccagtgcccaggatgcctcttccatgcccctagttatcagtcgggattccatcagaggaaacagtgagagctgctataggagatgagagttgttccagggacttgaccttacacgactgtgggagcttggtgaacagttagtttgttttaatttgttatttcaatacctttacgaatacaaatggtttttggtttcatggatgaactgtatagtggtgaagttggcttttaggatacctgtcatccaaatagtatatgttgtacctaataggtagtttttttatccctcattctccgcctcaaaactccttctgagcctccaatgtctattataccattctgcatgcctttgtgtacccatagcttagctcctatttataaataagaacacgtggtatttggttttctgtttgtgagttacttagaataatagcctatagttccatccaagttgctgcaaaagatattatttcattattttttatggctgagtagtattccatggtgtatatatatgacgttttatttatacactcatcagttgatgggctcttaggttgagtccgtatctttgtaattgtgaattgtactgtgataactatatgcgtgcaggtgtctttttgatatggctttttttttttttttgggtggatgcccctagtagtgggattgctagattgaatggaagacctacttctagttctttgagaaatttccgtgctattttctatagaggctgtactagtttatattccaatctccggtgtgtaagtgttccctttcactacatctgtgccaacatctattgtgttttgattttttaaataatggccattctgactgaataggtggtatctcattgtggttttaatttacatttccctgatgattagtgatgttgaagatttcttcatatatttggtggtcatttgtgtatcttcttttcagaaacgtctcttcatgtcccactttttaatggtatcatttttttcctgctgatttgaattccttgtagattctggatattagacctttggtcattgtatagtttgcaaatattttctcgcattttgtgggttgtatgtttactctgttgattattttgctatgcagaagctgtttagtttaattaggcctcatttatttctttttattgcattcgcttttggggtcttagccacaaattcattgcctaggccaatgtccagaagagtttttcttaggttttcttctagaggctttttggtttcaggtgttacatttaagtatttaatcaactttgagttaatttttatatgtagtgagagatagagctccagtttcattcttttacatgtggctttcaatttacccagcaccatttattgaatagagtgtcctttccctagtgtatgtttttgtccgctttgtagaagatcagttggttgtaagtatttggctttatttctgagttctctattctattccattgttctatgtatttacttttataccagtaccatgctgtcttggttactatagccttgtagtataatttgaagtcaggtaatgtgattcctctggttttgttctttttgcttggtatttctttggctattcaggctctttttttggttccacatgaattttaggatattttttagttctgtgaaaaattatgttggtattttgataagaattgcattgaatctgcagactgctttgggcaggatggccattttcataatattaattcttctcattcataagcatgggatgtttttccatgtgtttgtgtgatttatttcagcagcatgtgatagtctccttgtagagatctttcacccccttggttaagtatattcctaggttcatttgttctttgtagctataataaatgggattgggttcttgatttgtttttggtttggttgttatcagtgtatagcagtgctactgatttgtgtacattggttttataacctgagacttcagtgaatttatcaaatctgggagtcttttggtagagtctttagggtcttctagatataaaattatatcatcagcaaacagaaatagtttgagttcctcttttcctatttggatgacctttcttctttcttttgcctgactgctctggctaggacttcctgcactctgttgaacagaagtggtgaaagtgggcatcctgatcttgttccagttcttaggggtgagcctttcaacttctgcccattcagtattatgctggctatgggtttgtcatagatggcttttattattttgagctatgttctttctattcctagtttgttgaagatttttaccaaaaagggaggctggattttagaaaatatttttctgcatctattgagatgatcatatggtttttgttagtacttctatgtatgcagtgaatcacatttactgacttgtgtttgttgaaccatccctgcatccttaggatgaaacccacttgatcgtggtgaattatttttatgatgtgctattggatttagcttgctagtattttgttgaggatttttgcatctatgttcatcagggatagtgacctatagttttctcttttgctgttatttcctttcctggcttaggtatcagtttgatatgagctttgtaatgagatagggaggattcctccttctcaatcttttgaaatagtttcagtaggattggtaccaattctttttgaatatatggtagaatttggctgtgaatccatctgattttggtttttgttttgtagggagatttttttttaaggtattactggttcagtctcgctgtgtgttattggtctgttcaggatttctgtttcttcctgtaaaatctaaatgttgctaatgtttggtttgcatcaatgttgttgcttcaaaccaaaggtaactactgatatcttgatctatgtactttgtaaaggccctacctccaaatagcattacatttagggttagaatttcaacatatgagttttgggtggacacgaacgttcagttcataaaagattatttgagacacaaagtgacttgcctggaagttcctttcttctcctcaccctagcccttgaagaatgaagggatcaatatttggcccatatccattcctacatttatggcatgtctatgtactttagctctctaacgagaaatgtgaccagaattctgattcttttttccccctattatttttccttatctaggttttgtgcttactatgtacaaatctgacggtgattgccagctaacattgatctatgtaatttggataaatggccagcagcctgccttgttgccatggttgcttactctaatttttctttttttttctgggggctacatgatattcttgggaaggccaattgtacttttttcctttattatacttatttcattaaattatagttattttttatttttatactgtgagttcttgaatgccaagacctgcaactaattatttctccagtatatttcttatagtataatagatttcttagaaacctaagtttgacccattcagtggtcttattaatgtgatacctaatgtgaaaccagtgctattaagatgctttgagtatagacacaaacagtgagtgtttctgtagattcaaatttgagggtgtaccaactgaagggaagacaatgtaccctcttatttaggggagaaagaatctcaaatagttcacagtaaacgttatcagcttcatttaaggattatgactagggaaaaacacgctgccttttatattcctcagttgttacaacacagacatctgtaagtctacttagttgctatttggggattattaaatctctagtaagcagtacagtagagctggagtatggattttgtggaatcagtggcgtgagtagggaaagaaaataaatgggaactggccagcaggttgagagatggaataagaatcggaagagattgaattgtagtgtttgagttaggtagaaatgatgttcaactggagtgcagtttatattgtactgaatcagttaatagaattgaggaaaaggtctatattgatatatttaagttctcaagtcagtgtgcagtatcagtgaagaaggctaatcgaacgccaactaagattagggaaaatattaataatatgtaatacttctccagagtgtctcataaaactaaagacgctgagttggaaagtatcttagaggtcatatagtctacctctcccactatctccttaacttttatatttaatacatgctattaaatgttagaatttggagcaacacattaggagggattaaaacactcaaaataacaactaaaaagttatcagttattaaaattcagcatctaccatgacgaatttgataagcatgatcttgctttctaaaaggaaaaagcatagcaagctacactttgtatctagcagctcactcggccccacacacctgtctataaagacagtgggaggatgggaatccatgtgttcttggtgtgttgatcctgtctttgcatgtttcctctttctccagtaaagtctatttctagtgaggcaacatagaatttgtctcaaaccattgtgcattacatggctaccttaagtggatccactttgcaagacacctgtgtatacatcctctaaatccattatctcccacttgaaagtatttccctaaattgcccaagtagtgttgtaggacttacccttagttcaactaaagacagggtccttgtctgtcccaaagccataaaaacgtaggcttgcagatcatctgaacagtgagtaaggagggttttgttgggggaaaaggaagaaaagggagaaacagggactctcacaaggccagagtccctgctagagtgcttcctgacaggttgtttgaatcccaggttccacataggaagaggaggaccgcagctcctccctgcttgcaaagggtgccaacttccatggctccaccgcagtgggcaggccgcttggagtttctccaggcaccccctcccacctggctgtctcataccaccttctagagaaatacatctaactgccattagattaaggatagggacaaagaactatcttaactgctttcgcctgataagggggcactgttttggggaaacagcaggcagatcaccctcagaggcctatctaagggttcctagtagaaggggccatgtgagaggctctggttacaggagtgtttggagtttgatgcttgaaagtaagaacagatacaccacgttattagaaaacatgtatcaaaatgaaacaaggggaggggtaaggatagctcaaaaatcccaaggccttttaccagtttgcatagggagagggaagccaaaagccctactggaagaggaactttacccttttgccagcatgttgtgcttctgggttcctttcccgctgagcttgatcctgagccaacaagtttaaggtttggaaaattaacttttcccagtttggaggattcattagagggaagtgtctaatagtacagagacatgattacctatttgtgaagagagaccagaggaagagaaaagagaaggtgccttttaaaggattcccaggggtttaggatgcagtctaaaggggtacagagtgaatataaatggctacccatctagaaaaaggggagcaggcatccctggttcctttcttttcctagcagatacccacagtacatgaggaagagagggaagagcatcctcttttcctcttctgtccttgcatccccagggtccagtgacctcggcagatgccaccatgggtgtcaaagtgacttgcacccatgaagcagggaggacctagagaataggaattacccactctcacctatgccactatctccgctactgtcagtagccttggagttccttagtcctcatttatgctatggatattaacatggcctttattcatgaaagcttggggttggtttaatcggtagaaatcagccatgctcacatgtgctatgccttttaacttctgttattgtctgcctctggatccctcagatccagttttccttcctagggtttttatctgaagcttggaattgagtttcagacaaaaatgtgtctcagcgggggtcgcatggactccttgtcataagccaaatgctaaggtcaaactggagctgagttctcctccaacaagagagaggaatggatgtcttgtgacacacccagataactggtagccatagttatgcttgctgggatttcggtggatgacacttagctttggttagctacgttggtcttactttcccaaaaaggaaacctctgggttatgggcatcctatttattcccactacctggcaggatttgtaggataactgttcagaactagactattgatccagatttctacattacccatccctcttgttctttctgagctgcagctggggatcagtggttggttcacaggaacaagtagggttgatctaaaatgtaggtgaaaacttgaaaatgactggtgagtttagaatttaatgacaagcatatgataagttttgaaacgtgatttctctcttgcaagtcctcatttttgttaaatatcatcatgatggaatgatttataaaacagactttagtcttatacttggcctggttatttgcataaagtgcagcaagaataactatttctacataggccttttgaattggctttcatggaactctgtttcccaaggaatcttagataagaccttttaaagccaagcccagccatgggtttgtattgtcaaatacccgtgagttgggtgattttctcctcttaaggtcccaagacaaacttggagctcctggacctgttagaaagtgacattctttactgaccacaggtcaagaaccctgtacagggactacatggacaagggtatgaggccagtttcccactagatttttattggctctgcaagtcaagattgactccttaaagggaagcatacccttccagtcaaaaccctggtaaaataactacgttctctaattgtgtcctgttgcaaaagaaaaatggattcttattgtactgatgcaaacaactatattgccataagaatactgacagatagtttccaaattctagaggaaccaggcagagagaaacaaacatgctccaaattttgaccacaggagtgtatacttcacttaattattaaaggtcgtaaatagttcaaactaagtttccttgactataaaaaaaactaaagcaaggatcatcaatattccaagcaaaagtcaaaaagatttgctttagcttcctgagttcagtccatttacttaactcttgttttgcttgacattcatgaacatttcagctctttatgagtcctgtactttttcctttattccaatgttacagtctctaaagttatcagaagcctgtatttgaaagtacctgttaaagttgtatagcttattataaaccatcttttgaaaggattaaaacaagacaacaatcgtctgtgaataacaaaatgtccagggtagttacagttagacacacaattgacaaagaagttttgttatctctgttttacaataacttaacataacaaccttaattatgatttatggcatatacttagaccttagaattttagaaatcccatacaattttggaacatatattagtattatccaccaagatataacctaaagaagattgagcatcattttggcaatctcatatacctaaacatgtcaaataatcctttttacctctcttttctagacacttcaggggccctctgaagtattcaaaaaaccaggtgccagggaagacaattttgaaactgaagtttgattttgggaaagctgttaaatatgtttaaagcacttaatattatgaaatagaattccagattaccataaattatttattttgccaaaatgactcagaaattttaaagaagcaaaaaccttttataacccttttgaattttgttaaggagcagattagcattttaagaataccttgttgttcttatattttaatgttcaatttacagaaaaaccatataatacccttttttgaagttagtcaatatgttcacccagagaacctcttctgcaagattaatttccccagttcttctaccacttgtttgaaccttcggctttctcttatctaatttaaaacaatcctttaaccctaggcaaaaatttatatttccatgccttcttataacattttacaaagaaaaagcacattttactgttcttataccccttgcatgtaaatctattttgagtagtctcaattacctgttataatggtaaccccagcaattgttatctttaaggtgaaacttgttaagttgctttaattgtgtgctaactgcaaccaaggtttgactatagcataataaggggcatagttagttccatagtccccaggccttaccaattgtgaagccagcaagtcaaatagttctcaaaacccaaaaagcagtttgtaaactcacaacacttagaaaactttgcatctgacctgcattttactaatagtccttaggggtgtttttatttcttaaagattaaagtcacatgaactgaaaggtaccatagattttatcttccctttaaaaacatcagatccaagcaattgtctttcttttggccaaattaattacagcttttttttttcttgttgacttttttttaaaaatttttaattttactttagttccaggatacatgtgcagaatgtgtaggtttgttacataggtatacatgtaccattgtggtttgctgcacctatgaaaccgttatctaggttttaagccccacattcattaggtatttgtcctaatgccctccttccttttgcccctgactccccaacaggcccgggtgtgtgatgttccccttgctgtgtccatgtgttcttgctgttcaactcccacttatgagtgagaacatgcagtgtttggttttctgttcctgtgttagtttgctgagaatgatggcttccaccttcatccatgtctctgcaaaggacatgatgtcattcttttttatggctgcatagtattccatggtatatatgtgttacattttctttatctttattgcagcactatttacaatagcaaagtcttggaaccaacccaaatgtccatcaataataattagagctcttttgacagacattacacacaatacacagacaggcaaaaggaaacccagttgctgggtgaagcctggcctagtaaaacatctaaaaaaaaactttaaaagttaactgccaacagaatggagaaggggaaagaaaaaagaacagtttaaaaatgcctggggaagaacctcttattcttagataagtggtccctccaccaagagaaaagcttatttactgtctgatggagctgaaccccttgaccagggaggtggaaggctgcggcagcatgcctggctgcgaaccagccagtggctgtgcaggacccttgggccatgcgtcccagtgctggcagggatgggggtggcggtggggagctgctgctcacaggtgggtctcgaaaaaggaaggaaaaggcatgaaaaggcctgggggagacagggggttgggggcatggttctccaccctcagaagtccagggatgtaaaggcttagaaggaacagtaagagtttcagtccccatttcactcactgcttcttgagtccccacgttgcaggccaaaaatgtttcaggacttttccttagttcagctagcgatggggtccttgtccgtcctacggctatgaaaatttaggctcacaaacagtttgaatggtgagtaaagtagggttttaatggatgaaaaggaagaaaggggggtaaacagggactctcacaagcccagaatccccgctagagcacttcccgctgggttgtcggaatcccaggttccacccaggaagaggaggagcccggctcctcaccgctgcaaagggctggaacttctgtggctccaccccagtgggcaggctgcttggagtttctccaggcaccccttcgctgtctcagtaggttgctggtgtattcagtccacacagggtgtggtttttgcttctaacaacagataaaggtcgaagcaaaagtatggcagtctgttcttgctgcttcccgtggccacatgttgctcttgcatcctgtcctctgccatggtgaggctactgctggtctggatgcactggtgacaccaccgtggatattcagttcacacaaacatgctcagctgttgtgccacgaagtctccccacagtgccttgcatccagagcagttcttggtactagtcagaagctgtgcccaacagctttgcctttaaatacctgtcttgggcctggctcaccagcctacatcattctttttccttttcattaaggtgaagttgtgcttcccttccaccttctcctcagctttgaatcttggaagtccattgtcagattctcattctcttttccttctgaagcttcaactttgcattgtagtagctttaggaagttgtggtttgatcaattacaaaattattttctgttttgatcctccctgaataattggcacattttccttctaaaattacaaagaaagactactcaagcaaaaataatttgcttcaaggtgtatttctgtaagcttcaaaatattttaagaacattctacagtgacaccccaattaagctttacatttgtaggcatcctgcttcctgctacttccacgtacaatgtttcaacttgaagacaactattcaagtatcatattaacattcaaatagcatcttagtatgtggctctgggcaaatctttgtgcttcagtttactttattgtagagtgaggataataataatggtatatacatctctggttattgcaaaaattgaatgaattaatatatgctaagttcctaggacagtgtctgacatatagtaagtgctatttttgtgttatctgttattattatcattattgttgttattaccattaggtcaaaatcctttactccaaaccttgagaccagctatattttgaaattcctattgttgggtttttcttaaaggcaatacagagatacactggtgatattatgtaatatccccaatggagcataaggcagaatcccataatcaagtatattaatatttatgcaaatatgtacagcaaattatatgtacaacaagttgaaatagataaagagcatagataccttctctatttcaggtcaggatttgacaaaaattaaacatatttttggttttcaaacactttggattttaaaactgcagataagggattgcaaatctgtgttgttactatttttgttcttattcttttttttttaaatcactgttagaatttactctcctattatttttttgtatggttctcagtttgccactatcttgcttaagctgaggttcccagagtggaacatgttattttgggtgtgacatgctggacgcagtaggattgatacatcagcctcttaatgttgatattaatgcttttgtggccagttcaccaattatgatttttaatcagcaaaaacgttctttctttcatctcatattttctcttattatttttgtgcaactggtctttggaaaaataagtttctccctgtgaaattgtttttccccatgaaatttaatttttcaggcttggcacattttcctagtctgatgagataattttggatcctgactctgtcatctcaatatctgctattaccgtgcatcagatacaactttgatcagcatgtcttaatacaatttggtgataaaaatattgaaaaggacagtaccaagggcagagttgacattgctcattagtaaacattagtcaacactatttggaatagccattcaactcattaaaatacatcagactgtatgacaattcatatttccgtccttgactctaactatcaaaaagatctttgtctgaggtcttgttaaaatccatatttgatctatctacagaaatcccatgacatgtactgcaatagccctaatgaagaaagaaataaggaggctctcacctaatttagtctttaaaaacccatgtttcctctttctgtttgctttctctctttcaaagtcatcacaaaaatctgtttgataatctgttcctcagattatcaagaagattattgaaaacaataaaacatgcagtactcttggcatgttgatatatgttaaagatgactacataatttgtcattcaaataaagatagttttattttatataatttaatattatattttatataatttcaacttttatttttgattcagggagtacaagtgcatgtttaggtatatcgcatgatgctaaggttttgtgatgtaaatgatcctatcacttagttagtgagtatggtacctaatagatttttgcgtcttccgccctccttctttccttcttctagtagtccccagtgtctgttgttctcatcttaatgtccatgtgtacccaatgcttagttctcacttatgagtgagaacatgcagtatgtggttttctgttcctgcattaattttcttaggataatggcctctagctgcatccacagtgctgcaaaggacatgacttcattcttttttatggctgcatagtattctatggtgaatacgtattaggttttctttacccagtccattgtcgataggcacccaggttgattccatgtctttgctattgcaaatagtgttgcaatgcacatacaagcacatgtgtctttttggtagaatgatttatgttcctttggtatctgcccagtaatggaatttctgggttgattggtagctctgttgtaacttctttgagaaatctccagactgctttccacagtgactgaactaatttacattcccaccaacagtgtattttctccacagccttaccaacatctgttatttttaacttttaaataatagccattctgactggtgtgagatggtatctcatgtagttttgatttgcatttatctgatgattaatgatgttgagcatttttccatgttttttggctgcttttgtgttttaagaagtgtctatttatatcttttgcccactgtttagtggagttattggtttttacaattgtcttgctgaattgtttaagttccttatagattctggatattagaactttgttggatgcatagtttgcaaatattttctcccattctgtagtttgcagtttgatagtttcttttgctgtgcagagggtctttagttgaattaggtcctagttattgattgttatttttattgcagttgcctttgaggacttactcatattttttttcccaaggccaatgaccagaattgtatttcctaagttttcttctaggattcttatagtttgaggtcttatatttaactttttaatctatcttcaattatttgttgtatatagtgaaaggtaggggtccagtttcattcttccacatatggctagccagttatcccaggaccatatattgaacagggagccttttttccattgcttatttttgtcaactttgttgaagattggatgactttatttctgggtttcctattctgttacattagtctatgtgtctgtttttataccagtaccatgttgtttttgtttctttagccttaaagtatagtttgaaattgaataatgcaatgcccctggctttgttctttttgcttagtattgctttgagtatttgggctcttttttggttccatatgaattttagaatagtttttcgaactctatgagagataacattgataatttgataggaatagcattgaatctgtagattgctttgggcagtatgaccattttaacaatattgattcttctaatccatgagcatggaatgttttttgttttgtttgtgtcatctctgatttctttcagcagtgtcttgtagtccctttagagatatttcacctcctaggttaaatatattcctagatttgtgtgtatgtgtggctattgtaaatgggatcatgttcttgatttggctctcagcttgagcattattggtgtatagaaatgctactgatttctccacgttgattttgtatccggacactttactaaagtcatttatcagaataggagccttttggtggagtctgagatggttttctaggtatagaataatattgtcagtgaagagagataatttgatgatgtattttcctatttggatgcctttgatttctttttcttgcctggttgctctgactaggaattccagtactatgttgaataggagtggtgggagcaggcatccttgtcttgttcctgttctaagtggggatgtatccagcttttgcctgttcagtatgatgttggctgtgagtttgtcatagatggctcttattattttgagatatgttcttttgatgcctagtttgttgaaagcttttatcatgaagggttgttagattttatcaaaagctttttctgcatctattgaaatgattacatgtggttttaaaaagttctgtttctgtggtgaatcgcatttattgatttgcatatgttgaaccaggcttgcatcttggaaatgaagcctacttaatcatggtgaattaactttttgatgtgctgctggattcagtttgctagtattttgttgaggatttttcaatctatgttcatcagggatattggcctgtagttttcttttttctttgtgtctttgccagcttttggtatccgggttatgctagcttcataaaatgagttagaggggagtccctcctcctccattttttggaatagcgtcagtaggattggtaccagttcttctttgtctatctggtggaatttggccatgaatccatctgccgtagggcttttgtttgttggtattactgattcaactttggaacttgatattggtctgctcagtgcttaaaatcttttaaaatggaaaggaggtctattaatagctatgccagaaaggcaggcataagctaggaatatctcagacaaatgaggacatgtggtcgcccataagtgaacatggctgagagtctctaattccttcagagtgagaaaatgcattttacaatatccctgtctgtccagcttcgtgcctggcttcatgccagtattgacaccaacattctttaattgacagttgtcctctattacagaaaataatgagaagtagagcaacaccccatccatcaacactaaacatttcataatccatttcctctgtgatgaacggaagctccttggctttacgactcttgttgtactggatggcactttaaaaagaaaaaaaaaatagaatatttttcttgctgtctatacattttcaagccttagcttattatgtttttgagctttcctgactctaagtttaggaacattctcctctgtactatttgtccttctatgatttgcacaaatcctcatgaaatttgaggtcatcagagattcctattgatctctttagatatgccttcctgcccccaccttttttgttttctgaattatttgcagaagaaaaattgaaatttctttctgaatagtctaataaacctcttgagccttcttccatttcagagtttcagccatggtttcatgctcccctttattaggacttttttttgaagcctcccttcctggcttctattcatctgattaaagctaatgttcctttcactagctctgatgaggcttaagatgtcatagacacttttttcctatggtttctttcattttcacactcccaatctacttggtggccagacttaatttgaaaaattgcagtttttatcattgcttattctgttatcttcagcataatttatacatttctattaagagatccctttgcagtcttattttcctttaagcttcccaatccctggagaaaataaaaaacaaaacaaaacaaacttgaagaacctgttacaaaatgtaaatttagagcaatttggaaaatcttaaggtatttattataaaattaaaactgagcaaagtaggaatgtagtcatggtattttaacagttaataacaatacctttttagtcatgtatcaaatcatatgctttgcacacacagttatagaatcattaaatatgagacaagacagaaatccacttgtgaagccactgtgaagacatgggaactttctcatattaaagtggcatattgatttgaaacaagttgttagggagcttttttacttccatctctatgagtggattttaaatctgctctcttgggaggaagagtatggcagtcacacttctgatgcttgtatatttccaattcctcttcctactcaaagaaggaggcatgacgaaccccctgagtgaggcacataaagtctccccacagcccatttgcgacagtgcagaggcactacaaggaagaactgacacttgggcttccattctcaggctcttcaggtgtttgttttcttgctcctcatgatcaccaatgaagccggggctattcatgctggctgacccccatcctgtaatgagtggagtcctgagggtcccagggctgggtttagaaagtgatttagaaggtacaatgtattctccttttggcctttaaatgttttacaagggtacacttagaaacctgagttttttaaaacatatgttttatattagaagatataaaaattcaaattcaataaagatcatttacaagaaaataaagagatttttttaagttttaatttgtgtaggtatattgtaggtatatatacttatggggtacatgagatgttttgatacaggcatgcagtgcataataatcacatcatgggaaatgatgtatccatccgttcaagtgtttatgtttacactttgtgttacaaacaatccgattacactcttttagtaaaatgttagtaaaatgtaaattaagtcattgttgactatagtcaccctgttgtgctatcaaatactatgtcttattcattctttctaactatttttttaacccattaaccatccccacctcctctccatgccatctctcttactacccttcccagtctctggtaaccttctattctctatctcaatgagttcagtcgaaaaacctgatttgttttgacagttgatactgacccttatacatttatactttactggacagaaactaggaagtgattggtgtgaaatataatttgggcagaaaagttcaccttggactttcccaaaaaatatttaaaggtagtgctcgttataagaatgacagtttcatatacttttgttaattccctcttggaactttaaccagaagttttggcagcctgattagtcaggggtattttctgagaaaagaataattaaggacggataattgcactaaaagtaattaaaatattattcagccatactgattttaatattgtagtagacttatattactagccagggaaatcagtagacttcaataaaaagtgtagacatgtatccaaacacctgtaatcatttagtatataatagaagtggcatataaaattagtgagacacaatatgttttattcaaaatatagtgttggcacaaatttggagaaaattaaacttagatttatttgtatcatagtctctaaaataatgttcgtagatattagggagttaaataatccctagcatttattatttattatgtgccagatattatgccttgcactttatatagattatccagtttactacttttaactgctctgtgaggcaaatactagtactacttattagttttatgataaagaaattaaagcacagatcagattaatcatagatcagtggaggcagaatagatcataagattaaggtcagtgttaggaatggcttccagtccccacgcttttaaacaatgctcgttaaaagaactaaatggaactactgctgaatatgtatatgtagttgcagcacagagatctttcaaaacttgtcaccaaaaacaaaagccatgaaggaaaaaatttagctacataaaaactaaaggcctcccctcttgaagaaaataccttaaatgaaataagacaaatcaatgatattttaaatgtatatgacagaggatggattaatatatttaatgtaaagaggtcttttaaaaagcttaatactctaggaaaaaaatggacagtaacatgaaaccaatatacaaaagaagtgtaaatggcccaaaacatgaaaaatgattagtcttactagcacacaaataaatgcaaacaaaatcaaggatatcaatccacacttttatttgaaatagtggaaatacaaagacctaagtttttaactttagagaattgatgaaaagcagtagaatttaatgcagtctttaatgttttaagaataaaatgaaatggcaaagcacacaatgtattgccaagtaaaaagaaaggaaaagggtctcacttttatttataaacaaggcacagatctgcatatgaattaaatactagtatgtagtgcaccaaattgttaacagtgatcagttctaagtggaaggcttattatggttgaatatttctctctctctttaaaaaatctttcacttctgttttccaaatattctaaatggacgtatcatatttgtatttaggaaaaaaatatgtatgtatagtgaagtaaacactcaaatctaaagccactccagagcatcacttcccttttctagttatttttagtttacaaagctcaatcacgtacacattattatttaacagaaatgccaccacaggtaggttccccctgccacttgtaatagcttgattttctatttcacaattttggagattgtaggagatcggtcagggtggtgggaaaaattatagaaagatggaaacattcctggaaggctgggaggttttgcagaagctttgggaaaggattgggctgaaggcagctgaattctctaagagtagataacaaggaagtgtaagagaattgatcaaggtaagttagtttacttaggcctctgaacctgggggcggggcggggggcggggcgcaaccatattaattacctacaagtgtgttgcctcaaggcctttgtctttatatctgtactgaataaatgactgtagcggccgcttgtcaaggctgcggcctctgtgactctttacggcatcctccttgatgtctgtgagtggctcggtcccctagccgcgcggccaggcaaaacacctgtgtctgtgtacgttttttcatctgtcatttggccagggtctgctgggcgggcccggcagaagacgaagaggattttttttccaatctaatattgggatttctggtcttccttctttacataaagtatattcctccattccagttccttagagcacatacatcatccctggttccctggtgtaaaaagttgaagtattttgctccagttgatctagaatgtggtcttcttataaactgttaacagataaacccaatgccacaggattcatcttggaccaggttgcagtattgagtggactgtggacatagataacaggtgatacatgtgcctcacatttatcatccccaaacttcttggattcgatgctctcttaggctccttccaagactgccagttttagatcctattctctgctcatccagtcctactcattggttccaatcactagttctgttctttgtaaatcattttgctttctccctcaagtataaggccaggccattttctttatcttctctttggtctctggagaagcatgactttattctttttggaatttgagttcaccaacatttagcttctgttcagaactgctttccatgactctgggagccataactcagctcatggctgatggactgttgttggaaatgtgtggcctcagcatatgttatgccatcaacttcactcagctgaatctcacctgttctttctgcctacttctctttatttatttttcctgtttccccttttgaactcatatgacttttaaaagctctagttccattaaattctttcccagcggctcaggccattccagccaacacatcatcagctgcaggctgttgtttcttctttaaaaattaatataaccgttagcatctctttacttaattttagtttgtcgtttccggctttagagaacacaaatctataatgaggattagggaggagctccccctatgcatacacaggccacaggccttctttcctgcacgctttaaatcactcagcggaggctcctcctctgtgggtttccccactcactccacccccaccacaatagctcactaattaaacaactgaattcaaaggttcaagtacattcccagcatacacactatgtcattaggtttatgcaaacaaagtagttttactgaatttatacttttgacctgttatgtttaggcaaacactttcttcctaaagcctgcagactctggagttcagaagttctgaaattcacagaagctgagagtgatagaagcttggaactattatacatgccctctgatttcaaagtttatgttcctaaagcattgattgccctaataattagtaaacgttagaaatttatatttggtttactaatgctgtgtaattgttatcttgtttgtaaattggaattgtatgtgacttttttgggggggggttgtttttactgctaagaaaatatgtcagtgtccactgctctattaggttggtacaagagtatttgcggttttcaccacaattaaaaaccacaattacttttgcaccaatgtaatatttaatgtcaagcaagtaacttaagctcatttttcctttctaaaaggttatttttgtgtgtacaggcacaacctgacttgatctcgtaacttaagctcatttttcctttctaaaaggttatttttgtgtgtacaggcacaacctgacttgatctctgtgattccatattaatttccctatgccttattttcctcacctaaaaaaatgaagacagtacctcatggatttctcttgaagaataaataatagaaaccattgtagcactcagtaaatataaattgctgtacgaacattactaaatcacagccattgtgctgtctacataagcacttttcatttgggttccttgctaatgcattaatctgttgccagaggtaagaccctgcaaccgatgtcagaagtggatgaatttgtttccctgaatatgcctagcttttaaaggctatgcttactgatgagaggcataactttttattattattattattaatgataaacacagctactctgtgaacacaagcatctccaacatgcagaaataacccctctctgtccaactgttaactctgatcttcttttagtggctgtggttctgtttggtaggtcttttgtttttttatttttttatttttgagacagagtcttgctttgtcatctaggctagagtgcagtggcacaatctcggctcactgcagcttccgcctcccaggttcaagcgattctcctgcctcagcctcctgagcagcttgggattacaggcacgtgccaccaaacctggctaatttttgtatttttagtagaaaccatgttggtcaggttggtctcgatctcctgaccttgcgatccgcccgccttggcctcccaaagtgctaggtttacaggagtgagccactgtgcctggcctgtttggtaggtcttgcttccaaaataacatgaggaggagtggaaactgttagctctctcaccaattcaaatgccaataagatgccccaggccgtcaaggctggcttttgcctaagcccctccttcacatttctcactgttttgactaccagaaggaaaggatgtgtggggcacagtcagcaagttactctagttatcttaccccaatctccaaatccccagaactctggcatttaatgccccttggaattattttattgttattatttctagtctataatttgtaaccccactcttcccctccccaacaaatggaaagccaatactaaaagttcagtggacagttccctgaatttgatgattggtaggcaatttaagataaattttattatttatgttacattaccagctatgaagaaagggttgagtagaatatctatttctctcaataggagaaagtgcaaagattagcccattttctgtgtgtttctataaatataggtaccctggaatgtgattttaatgctatatctttcccttgtgtcatgctttggaaatgtatctaccttgggagtcagttaaaccacatgtggatgttttaaataatccttgtgattaagcaagtaaaatatcttctttagatttggaccagctattttgtttccatcataattttggacattatttgataaattaaaacaataatactgattcagatgcctaatatgtttgtaatgagatatccaagaaaatgtcatctcatgtgtttatttctagatagtatccatcagagataagcatggtttaagatgaatgaccagtagttgagaccaagaaggatgatttattagtccgttttaacactgctataaagatactgagactgagagagagagacagcaacagagagagagagagagagagaaagaccataatgcaatcacctcccatcagatctctccctcaacacatggggatgataattcgagatgagatttaggtggggatacagagtcaaactatatcagatgaaatgttttaaattttccattatatttaaaaagattatgggatgcaactgggatctcataggataagtggatagagaagatggtggtatggaactcaaccagatgatctgatacagtgggttctgaatattacattgaaaacatgagtgaatgatagactggcaaaggaatatgaagagctaaggatattattattgtctttatgacaatataaaagttatgaaaagcacctttacgcagaatcaatcacattttcttcctgaaaaataaaagcaatgttgtaccatccattttatgtatgttctttttttacttttctggccaaattttctcagttctgtttctttgggtcacttcttgcatttgccagagacatttcctccagtcaatgattatttgcattagttccctgtggctcttcctgaattttttcaatggcatagtaatttttttcttgaatatttcctactgctttaattttcactcctgttttaaattcttcattaattaagctttcccaaggcttaaatacctataaaactttttaaaacttaatcatttgatttgcctgctcagcttccctagtcttacctggttttaagactgttaaacctaaaattgtgcctgggagatggtgtgatcacagaagggaaaagaaatgatgacattgttattgaaagtttaatgatgagtttcactggaaaaatctcccacttcagtgttctttgtgtttcatgctgataagccgctaataattttaaatgccttcattttagatttaatttattaaaaacacttatagttttcaagtccacataaatactgggtacaattcattcgggctagaagaaaatgaaccttacattgtcctttgcaaatgttgtcgcttacctcagcaaggctctttgattttaattctgtagaccataagcctgccataatttttctgattaagaatttggaactagaggttgaccttaaggataaagtatcacatttttcttcaatttgaagataaagaaatgaaagcccagagaggttaagtttgcagagcaggatactagcagagccagagcagaacccagggatttgaatgctctgaggtttgttcacacacaagtcaccaggggcgatcagtataaccataagccagaaagaccatgagttggtctgaaaaatcacacttgtcacctcacctaattcagggccagatgtagaagaataagaagaatgtacctgaatctgcttaggggtctagttatttctataaatgggtatatagagagttcacttgaattctaatggatgacatttcctcttgactctagggaaagctgtaactgtcttatgatcccacgatatggactctaggactatgcttttgtgactttcaaatccagcagttgtttatagtttgtgttataagatctcctgccaattattaaaggtatcttttctattatttgaaatagccttgtgttcaattgtatcctcttcttccccacaatgcatattaccaggataggctctgttactacttctgaagatgataaatagaaatatagtttgctctttgatgagaaagaaaacaacactattgaactgaagtgcattaaaacaaatacccagagtattcatgggtattcttgttccagattaattgccctggactattatttttatttgagctttgtgatttttgaagtttccatatgtaacagaatcccttttttgttgtaagccatagaagcagctgaaaactgaaccactttgataaagtaagcgtattttctgtaaaggtttatgtgctttcagaaactaattcttgtctatacaatcaatgtaattttcttcttatttctgttgtagttaccttatttaatataatttgagacaaaatcagttattttaatgcaaaaaggaaagggttttatcttcttattaacaaggccacttatttggccatttctgtgaaataaatggtttgaatgaatccccctaattgaatattgaattgcctgttttagtaaggatcaccctctccttgccttttttttttttttttggagacaggatctcactctgtcacccaggatggagtgcagtggcaatcgtagctcactgcagcctcaaactcctgggatcaagtgatcctccacctcagcctccctaatagttgggactacaggcatgtaccaacacaccttgctatttaaaaaatgtttctgtagacatgtattctcactatcttgcctggctggttttggccatttttgaactcttttgattctcacacgttttatagagttttccctaaagtgcatagctctttattccttagggggatcttaaaatagggagatccctattttattgtgatgaggtcagtgttcctgtgactaatcactgagttacatatgtcactgaggaaaactgttcctctaagctacagagattcctgacattgggaaggagacatatagagttagccttaagcctgttagaataaagagtgtaagccttctgtattggtcagggttctttagagtgatgtaactaataggatatatatacatatataaaggggagtttattaaggaattaactcacacaatcaaaggtcccacaataggctgtctgcaagttgagaagcaaggaagccagtttgagccccaaagctgaagaacttggagtctcatgttcgagggcaggaagcatccagcatgggagaaagatgtaggattggaggctaagccagtctagtcttttcacatttttctgcctgctttatattctggccatgctggcagctgattagatggtgcccaccagatgatttctttgtcaccctctttgtcacccagatgaaggtaggtctgcctttcccagtccacttactcaaatgttagtctcctttggcaacaccctcacagacacacccagtatcaatatgttgcatccttcaatccaatcaagttgacactcagtattaatcattgtaagtctacgccttgtcgacttgaacccatacgcatctgagatcacacattatcttcaaataaagacaataataaggtcataattacacgtaacataatgcagctatccttcgtacaaccagaaatgcaccaatccccaacccaaatgctattacataaagctaacgatacttaaacgctaatatgaagtaaatctgatgtcacatgttaaaagaaaaaggaaataaaatgaacatatttccttagtacaggtgtatacatacacaaacatggttttaccaaaagaaggaggaaatactcatgacaattacagtcctcgtttctgcaactggtcacatggtcgtagctggtattgatgactaccttctacccattctgtattccctttgccttcagcaagcaccccagcaggtcatggttttttcctggtggagtcacccaaaccttcattcctgaagggtcttggccatttgtagtcctgcctggattgggctgttgtagtttcccattgacctgaatcacagggcatggtaatactaagagacgccgcaattgatctactgtattccatgcatactcttctttaccttcattgtggagcagtagactgatttcatcttgatagtctgggtcagtcaccccagctaacactgtaactcccttcttagcctgttgacttaaaggtaggaggagcccaaagtgtccaggtggcaatcttaacatccagtttaatggaattattgttgtgtttcctggtggcagcattcctccctctggaactaagacctctaggcgagcagaacataatgtcgcggtaccaggaagcaaaaattttgctggtggatcactaagggtgatggtgagtgctgccacttcgacttccaccccttgattcctggaccagtgaatcttggctatgggagaaacagtaccatatataggacgccgattcagagcatacacagccttccagaggactttgccccagccctgcaaagtattgtcacctagttggcattttaattgtgacttcaaaaggccattctgccattctgtcaatccagctgcttcaggatgatggggaacatggtaagaccagtgaattccatgagcatgagcccactgccacacttctttggccacaaagtgagtgccttggtcagaggcaatgctgtgtgggataccatgacagtggaccgggcattctgtgagtccatggatggtagtcttggcagaagcattgtgtgcaggacaggcaaactcatatctggagtacatgtctattccagtgaggacaaacctctgccctttccgtgatggaacaggtccaatataatcaacctgccaccaggtagatggctgatcacctcaaggaatggtgccatattgagggctcagcatcagtctctgcttctggcaaatcgggcactcagcagtggctgtagctaggtcagccttggtgagtggaagtccatgttgctgagcccatgcgtaacctccatccctgccacaatggccactttgtttatgggcccattgggtgatgacgggggtggctggggaaagaggctgagtggtatccattgaatgggttatcctgtccacttgattattaaaatcctcctctgctgaagtcacctgttggtgagcgctcacttgggatacaaatatcttcagagtttttgaccactcagagaggtctattcacataactcttccccaaatttctttgttgccaattttccaatcatgcttcttccaagtccctgaccatccagccaaaccactggctacagcccatcaatcagtatataatcacacatctggccatttctccttccatgcaaagtgcacatccagatgcactgcttgaagttctgcccacaggggaagatttcccttcactgctgtccttcagggatatcctagaaaggggctataatgctacagctgtcctcttttgggtggtgcctgcatattgtgcagaaccatctgtgaacgaggccctggtcttctcttcctctgtcaactgattatagggaactccccatgaggccattggtgcaggctgggtgagagaaggcagggtggcaggactggggaccatgggcatttgagccatttcctcatataacttcaggacctgctcaaacccaatcacatatatactacttccatttgatgatggaatgctgtggacatgacccactttgtgagtaggtgggtcagaaagcacccagttcatgataggcagttcaagtgataggcagacgtggtgacttgatgacccatagtcaaatattcagtttccaccaaagcccagtaacgggacaagagctatctctcaaaaggagagtagttatctgcaggagatggcagagccttgttccaaaatcctagaggcctctgctgtgattcacctgtgggagcctgccaaaggctccaaatacaatccgtatcttctcctgatacctcaggcaccattggatctcctgggtcatatggcccaagtggcagagcagcttgcacagcagcctgtacctgttgcagagccttctcctgttctggacaccactcaaaactggcagccttttgggtcactcgataaatgggccaaagtaacacatccaactgaggaatgtattgcctccaaatcaaataggcccattaggcgctgtgcctctttcttggttgtaggaggggccaaatgcagcaacttatccttcaccttagaaggaatgtctctactgactccactccaggtaccaaaatctgtattagtcaaggttctctggagggacagaactaataggatagatatatatataaaagacagtttattaaagagtattaactcacacaatcacaatgtccctcaacaggctctctgcaagctgagaagcaaggaagccagtctgagtcccaaagctgaagaacttggagtccgatatttgaggacaggaagcatccagcatgggagaaagatgtaggctgggaggctaagccagtctagtcttttcatgtttttctgcctgctttatattctggctgtgctggcagctgattagatggtggccacccatattaagggtgggtctgcctttcacagcccactgattcaatgttaatctcctttggcaacaccctcacagacccacccagagtcaataccttgcatccttcaatccaatcaagttgacactcggtattaaccatcataccctcttaagtggatctccctcctttgtctctgttatcacatttataatagataattcacatttgggatccacattttttagacatagattaagatagtgtgatgtacttgactaagaaatgcaccaagctaacatagcttctaaaagtgagtctatgatcatgagactttcttctcacagccatttcgtaaatgactggcaaatgaagtctccaaattatatcatcactgtagggatgccacagaagtaaagataactactccagtaaatatggtgggaatatggtgtttccctatattcttcatctaaggattatattgctctaataaataggtcttaatatcagtgtcgttcagcatttgttcatttaaagatatttaaatcatagtaaatttttctgtttgagtttgtgtgtatgtttcagataatggagtttctagatatgcaacttgttggtatctatcagcaaatgtcatccctgatccaaaagcataaatgcatccagtcatctgagaaattagccagatttgccttttggttttgaatctcagctaatgaatctgtcctgttagacagttctattgttcttacccttctctttagagctgtgacagacactgcacaaagaaaactactacagaccacagaggaatcatgggtgttgtgattgaaaataattaattcaaacattgaacagatatttttgaacagcaactctgtgtacctggcactacattaggcataaaatactagagatagataaaatagaacaattgtcatttcttatgaaaatcagaaaatttttactaaaatgacaattttaatgaaaatcagacagatagggaggatagataataatcacattaaaaatcagtgatttctgtgaactatgataggtatataggggatggcttgagagagtgtaataaggactctttggtgacactgacaggataaaaaggtctctctgaagtttgcaatgaggtcagatcaggtgggcagcaccttcctggcagagtaaacagcttgtgcaaaggtcccaaaacagaaaagcctatcggttttaaggaggtgaaatgaggtaggatcctggagaattgaatgtgagatggcacatatgatgcagctaaggagctagccagaatctaaattgttcattgttttggaagtgatagtaaaaactttggatttcttccaatgtacaatggcacaccattgaagaattttgattaaggtaattacatgattttgtttctagaaatttagtttgctatgaagaaaatgcattggaagagaacaacatgggaaaagggtgagacattttacaagcagatgtttcggtgcatttgtgagataatggtgattcaacttaaggtggtaacaaatgcagagagaaatgagtggacaaatttgaagtgtattttgaggcaaaactgaccacttggaaaatgtataaagagagagctttcaatgatggctccagattcttcatgtaagcaactctggatggtgtttccatatgctaagaggcaagtggtttggaatggaggagagggagcttgatagttcatttctgcattttttaatttgtgatggctatgaaatatctgagttggaatgtcaggggcgtagttgaatatatgaatctgaaatttgaagaagggaataggctgagttagatatttgactagaatttttcattgcaagcaataaaagccaaatatggcaaatttaactcgtaagatatatagatatataaatagatatatttatatatctatttatatctatctatatctatatctatctatctatctatctatctatctatctatctatctatctatctatccatctatttatgtagagagcaagatccccctaaatccttcacaataaatgtgcttatacatttgttgatttaggggggtcttgctgtgttgcataggctggccttaagctgtggggctcaagcaatcttcccacctcacttcctgagtagctgggactgcacgcatgcaccactgtgcttggctcctaaaggagatttattaaaagatactgtgaagtttgcagaccttccagcattacccactgggaacaaggccctagaatcaccccctaaaagtcatctgagaaagacaacattgctgccacccctgggcaaaatcatgatggctcaaagtaaatatagcaccagccctggccactgtatgcaggaaatgggacaaccatctctcttcctctggagagtgttgtttaatgaaatgcaacatgagagaacaattacagaagaataacaccaagagtattaccagctataaaaactgacaactgtagaatctttgctatgtgccaagtacaagattaagcactttacatggattatatcatttaatcactacaaaaagccaatggaggaaaataattgctatcctcattttattgatgaggaggtttaaaagtttatagataaatccagtgtgtggtgagccttggattcagacttacctaagcctgcagaatgccttctcttaagcatgtgggtggtatcacacagctgagaggccattgtgaggaagaactgataagcctctcctggtttggcaacatggacacaatttgtagcctttgaaatggaagtttcaatgctgagagagggaggaaattacagagggatgaaggatgaaggaagatgggttagtgagtggagatagtcttttaggtaacttttttgagacctttggctgaaaagaaaagtagaaagatacggtggtagctgaagaaggatcagggtatcaaaggaacttccttccttcctttcttccttccttccttctttccttccttccttccttccttccttccttccttccttccttctttccctccttctctcttccttttcttcttctctctcttccaccctgaagtcacttcttcctttaatcctaaagtaaaccaatctgcatttgaatgcagataggttaagtgttggcagggaagaagaggttaagaaagcagtaagacataataacttgtgaatagaggcccctgggcatgtggagggatgatgaccagagtgcagtgggattgacccttaatgtaacactttctctctacttcagctctagagacagagagggagggggtgagtaaaagaccttgaaaattcagttgtggaataaaagtaggggctatggtgtatgacttctattttccctggtaaaatatagggtaagttcatcagctgaggcaaaaggcaaatggaaactgagatttagtaggaggtagaagaggggcactatttgttgagccgagtgagagagagccagatggctaagaaatctagtgagattcccaggcagtgttgaagtcttttgaatactaatgatcatgaagttgaagtactacttagtactaatcagacaagccatgttttatttctctttccctcaccagaaaaacattttaaacttgtaatgtggtcactcaatgggttcttcctgttcactgcatagacaaaattaatcaattgagatggtgctattgcagtatagagtttaactgacatgagttcagcccatgtgggagaactggagctatcactcaacctccctaatagcttggaggctagggtttttatggactgtttggtgggcagggggctagggaattgatgctgttgattggttgggaataaaatcataggggtgtggaaaacagcctttgtgtgctgagtcttcctctgggtggggccatggggccagttgagtcatgagtcacaagttttggtgggattcatctgaaaaagtactcaaaaaccaatcttaggttctacaataatgatgttatctataggagcaattggagaagtcagagatcttgtgacttctggccacatgactccagagcagtaagagattagagaaactatgcctacatctcagaagagttcaggttcctcccataatcctattcttgtggccttttattagtctaacaaaggtggtttttggtccctgagcaaggaaagggttagttttaaggggagactagtatcgtcctagctttcaagttaaactataaactaaattccttcaaaagttagcttggcctatgcccgggaatgaccaaggacacctcagaggtcagaagtaagatggcgtcaacactgtcggacttctcttgctatcatgattttgcaaaggcagtttcaataacactggggagagtgtagagaatggactgtagactgaacagaactcagaacagggagacattagtatcctcacagagaataattcttccttttgggaaaatggttatctattatgaccttttctgagtgtggttccctggaccctggtcatggttgtcactgcagacaatatccagttatttgtcttgataatcagctgttaaactgaaataattcactgtgttgccagttgttctttccccactgtgggaattagaaagcatttggaaattggttatatcatataatacttgcactgtatatacagtcttccagaatagggaagatttaggcaacagtctggtaagtgaagtgcgagctatacacagaaaactagccaatgttttcatgagattttgattgaatagactaattttcaataggaggaaaaccatcctcttttgcagcatgacttctgtccttggggatgtatcatttctatccatggaaaacactgccatatggtcacggcatcagacatatttaagccttgaaaattagatcttaaagcataaaagccaagggatgatgtgagttctcacactttgtctacattcctttcaaaaacccaaccaaattataatgaaagagggaatatttatgagtaaagtatgaggccgctgttgacatgaggcatttatgattcaaactttatgtttaaatttgaaaatacgatatattttaatattaaacttcattccacaaataaagtttggactgattgattcacagttagcactgaaggacaaattttggaatcacaacatagatccaagataccatctaatgtaagattcaccatcgactttagaagcatatttctgcaaaagacgaaactctacattaaatgtacatgatttccttttaaccaaacccactttttcatacatttattcaaatgattttatttgactagactcttctgtatcatgatcaaaagttcagtctaagcctttatcatatatatagtctgtgcattctgcacgaccttcggtgacccactgttgagtgactttccaaagcctgtgcttctgatcttgacctcttcacttgccttagctttgacagaataatgttgaagcatagggaagaataccaggttttgttggcatttcctattttgttgaattcctagttttaaattttccataatagaagtagatactgctggatattaaacagtttttcttgaacatcagctggaagtttttgacagtaattgagttttagtctttaattaaacacagtggatctctggaacttctcgtagtttttaaaatcctatgatattccaggatatttgacaaattctgttgcttttaattatcctttcgcatgcatattaggtgattttttaaatttaatagctatacatatacatggacatatacacacatataaatatacacaaggttttaattatatgtgtatatattctttcttaaaaattggaaaccacttgatgttggatttataacatgataatacacattttttttttttacctacagtgatcattgcttcaaactatatatatatatatatatatatatatatatatatattttttttttttttttttttttttttttttgagacaagttctcactctgtcacccatgctggagtacagtggcacaatctcagctcactgaaacttctgccccatggggctcaagccatctttctacctcagcctcccaagtagctgggaccacaggcatgcttcaccatgcccagccatttttttgtattttggtagagacgggtcttgccatgttgcccaggctggtctcaaattcctatgctcaaacaatccaccctcctcaccctcccaacatgctgggattataggcttgagccactgcacctggcctgcttccaacattattactaacaatgatagttaacatttattaagcacttcctatgtgccaaacacaattgttggcactcattaatattaactcatgtaatccttacacttaccctattgtcacccccattttatggataagaaacaggagagaaagtaacttccccagaatcacctggctcttgagtggaagaactagatcggaagcttctgattccagcaagtgtgtttttgaccactagcaacactgcctcttaaaggaaatctgctttcttcaactctatctctatcgtatttggtgtaacaaccctttgcttgaatgttgtattacagcattattattattattgttattattattattttttttagatggagtctcgctctgtcacccaggctggagggcagtggcatgatctcggctcactgcaagatctgcctcccaggttcacactattctcccgccttagcctcccaagtagctgggactacaggcgtccgccagcactcccggctaatgtttttggtatttttagtagagatggggtttcaccgtgttagccaggatggtcttgatctcctgaccttgtgatctgcccgcctcagcctcccaaagtgctgggattacaggcgtgaaccaccgcccctggcctacagtatcatcttttttgatgacattttaaatcacaattagaaataaaaatgtaaagtctaatgatgtgtggtgcttccagtgaaagtgacacagggatgagcatcaaataccttcagcacaaagccgagttgtgcaatgtgctcctcacaaccactgtaaaatatatactcattaagaaatgtttgtgtgtaggaaatgtgttctttagactaatgagatatagtaacaataatgaagagctaccatttattcagtgcttcctatgtggctgaccctttatgacagacgatgctagtgcctacccaatatctactcattttgtatggctgaatacagtctaatttactttgggatagcagtgtgcccacccaagttctagttagaggagctcccatgacagtcttgccaatgaggtgtaactggaagacaggaggttaaagtgtggagaagttttctttttttcagataaaaaagaacaattttgccacaagagacatgtgctttggatcctcatacctttgtgcctcagctgatgttgtctactctgcccattttacctttccaaatcccacccaccctccagtctctgctgcaagatcatgtagtggtgtagaaagaggcctgtggattagtggccatgggtaatttttttcactaaattaatgaatttttctaagctttatttttctcatcatgaaatagtaaaactccctacttgtcagggatgtgaggattaaatggaataatgtaagaaagcttctccatatggtagctggaacaaaacagtgaatagtttctcaaagaagctttctcatgtgctcagcagaaatgatcttgctctttctcccccaagggccactctgcaccatgcttactccatgtcacatactatttttttctttattttgattaatagtatttgtgtctttcttaccaaataaaggtaagcttcttgaagtcactgacgcttactcatagtgagtttctttttattggactaaaagtatgtgttattctagagcttaagccaacctaaatttatcccacagatttgcagactttttctttgttttgggttcagaacagtagatggtcagtttaaaagattttattgaatagtcacagaccattgcactggggacaaagagagcacataaatataggcaagagaaacttttaaaaagtaaagtattcccattgctaacagagctcttgaagaatatgattcaaaatgaaatataagctgatgttaactatgcaggcttttgtcagtgaccaaagtagtagtgtataaagcaagtgattatgacattttatggtgcatttataccaattttctttaaaaagtgctaataatagtagaatatattgattcacactagataattaaacaccctcttggttagaggtaattcactttttaatgacatattaccgagcagtatgttctttcagttattttgggtttgatatggcaagaagggtagcaaaatataattcagatagggacgctcttctcatgagctttcccacctgtatacacctgaaataaagaaagtgaaatcaggagacagggagagagcagaaaggaagaaggaagattgggtaggagggggggaaggtccagaacaactactctagtttcagaaaatgacagggatggaaggaggggagtagacatacgttgtcaagaaatccaaccagacagctttactcctgatttcctctaggctcaaaaactgcagaaaatatatatgcacccaccctaatatatattctttgtccatactgacagagagagagattgataatataaatgcatacttttatacataaatcaatatataaatgcatagttttatacataaatcaatatgcataggtattaaagtagttgatttcatctcaaacatcaatctagctcattgatataattctagaaaataaactagctttgttttccctcagtttgaaataatattttatccttagttattctagtttattctcataaaacactccacctccctctctcccacacgtggcatatggtatccaatgacaatcataaatatcttgacctctccttcttaacacctcatgaactagaactccagccattaattgcactaaaggctatcataggttctgattaattatattgatatgttataaaattcttaaaacattctcttttatctttatgtataaaatggactcttttgatgagttaggctctaagtgagactattggaaagatttcatatctcacattccttcgattgccctattatggtctgtgtgttctggttatgtgttaagagttttctgacatttgaaatcacagacccatttgaaccacatggagtgcttttatttcaaaggaattcagccttaaatacagatgggcttgtctgcatggtctagatgacatttttataacctgtaatgttcttcagcaagatgtggtaaatgattcttcacatcatccaactagagagtgcttagttgttagtctcattcacaccacagcttctgagtctgctgaacacaaaattattactgccagaactggctaatgaaaatccaggtattgctacattattcatttaatcgtgatcagtattaatcccaatattgttgtcccctattttaatctttgtcatgctactttagtttagtgtaatttcactttttgctttttgaaacaatacccttcctaggcttgcagggaagaaatgtcctaactttgcctcttcttgcttggctgtgactccagaatgagctagtcctgctggagactggcttccagcactgttatgacccctactaatgtaatgagactgaaaattaagaaaactatcagaaaggtacaaagaagccgagagataagcctatggaattgtcttcatgtcccttctatttgcccctttgcactctcaaataactccccctttgggcctttggaccccacactgctggaaataaatttaataaatggttgttaagcatctgctttgggtaaggcactatgccaggggatgggaggatacatccttacctcttacaatttgtgacctcatatgtactatgtggtcagtagatgcacttccatgcaaaataaaatagatgccctaaagagagatgcaagcaaagtgttaaagttacttccgaatggcaggaaaagagcatgccaaggaagtggcatctggacaagcacttgaaagaagattcagagtttcatagcagaagaaaagacagatacgcattttaggttgtttgaagtgcttgagcaattttgggagagtggatgtccctggggaagccagcgtgtagctccagtggaccacgtggctagagtagattgtgtggtgagattcagtggcacgtgaggtggaaaatgcagtgaggttgaagtagagtacagaagtggcagtggggtgcccagaaggccagtgaaactgggcccacagtcaaaggaaagatacatgggacaacttacagaaattacttggtgaagaacctggtatagtatattcagggagagaatgagtggctccagggtgtctagactgggatgtttctgacttgttctgtagtgccctaccttctataaatacacctaagaagcaagatagactaagttacatcacaggcgaatgttatcttaggtacatcctagtgatttatacttgacaattgctttttatcctgctggccctctctatggtactccattccattctctagtgacttctggctgacctacaatacatgtccacccagcatccccttccagtactctaggctgcctttctaaataaacctacttgtctatatgccccatcccatcagaatcctgcattgagttatttaacagataaagttgtctgtgctaatatatgaacaaattagtgggttaacttcccaaagcaataattcttttgcattttacacataatcttgtggttaatccaaatagttatgctaatagtgggaatttctctgccttgtgccagagcagtaggaaggtatctggaggcttctatgtcatacaagatgctccccttctttttgtggatagagttggctctttctagaaacacaatgagggaaagaagaagtgttattaaaattaatcagtggtacttaggcaacccagtttacaaaactaaacaaaaaatatattttagcacctgataaaagtttattttaaaaatataaatgtattatttaaaaaaatcatatcacacccatgttacagaaaagtgtggtatataatgcttttatttatttatttattttcgaaatataccttcatcatggaaaagtgtcagtttaaacaaacttcaggagataggaggaatgggaaattaatattatcactactaaaaatgacccatttttatgaagatttttcatttatttcacaggtgatctcgtatatatttgtatcatctaccttcaggggaataattgttcatgttgggtacttctaaaatacagaaatcatgatcccttctgctgaaatgcagctaccttaggggcagatggtaatgattactcgaaaggccacagactgctgtaaatagattaagcatagaagggacacagattatgagagacttcaagggacttcgaggtagcaagaacataattactcaaattaaatttggcctacacaacaggctaatgcttcttttctagccacatgtttcagggagacattaatgttctacactgtaatattttgtgcaaggagaaataagtatctttcaacagagcaacgatgtctaagccatttttgtatttgctttttggtggtttgttatctggaaatatccagaaccattatttatttatttatttaacttcttttttttaaattacagtaaaatatacataacagaatatgtcattttaattatttttgagtttcgtgatgtgaagtgcattcaccttgttgaacaaccatcactactactcatctccagaacaagagtccttatttttgttccttagtcatttttatttatatgattctgtacagttaaagcaatatggttttcttttattttctttttttgcttatcatatccttccctcgcacccaaattgtatgactatttcaaaaatagatttctggtgtcatgactccttcgagctttgaattaattattctctcctggataatgcattttcacatgcatgctagcatatttaattggatattggccctcagataatagttttcttttgttgatatacaatcaatgaacttgacaatgggccaataaagtgttatttttttcctcctctccaatgagataatttgatcatttgttcttataaggtaacattacaaattatccttaaatgtggcgtagctattttaataacatcattgctattgagatgatgaagaactttagaaatccatgcaacaaaagttaaataaaatgaaaaaagaacctaaataaatataaataagttgtatattattgaaagataaaatgtcacaaggcatccagtttattaaaggcactttcaattactgtgcttttgttatttttataaaaattcctattttgtgtttgaatttagttagggtataagaacaaattaactaatgagataacctacagacttagatgaattcctacaagctttcagatgacagaaaaaaaaactagaagtatggtctctgattttgtttttccttcagataaaagggggttgcagaatcttcttttgtatcgttggtatccatggattctgcatctgtagattcaaaaaaccatggatggaaaatattttttaaaaaattgcatttgtattgaacatgtacagacttttttattgtcattattacctatacaatacagtggaacagctatttacataatatttaccttgtattaggtataagtaatttagagttaatttaaaatatacaggaggatgtacataggttatatgccattttatatcgggaacttgagtgtccttggattttggtatccatgggaggcctagaaaccaagcctctctggaccccagggaataactttacatattatatacactattctcctatgctgttctcataatttaaaaatacaaaatatgtattttatataagtttctgagagatttttagtcataaaggtaaatgcatctataaacttcagaaatcccaattccaaaaggcatttaaatcagaatgcataaagcatttagcaatttcaaaggaagaaaaatatagcttcataaaaattctaaagaatatttttattttcttttcagacattttggaatgtgtaaaacatccccttatgaattgaaaaaatacatatatgtgaaatgccagccccatttacctgtaatatcaactttctagtacaagaatgtttgtggttttagtggtgaatttatgatgtgtaaatgcttgtgtgtatttaggaaatctaatattgtttgaataaagtggtaaatttattatctcataaattaatggttgagctgaatcacattatagtcctttaacaagtgtgtctgtgatctgagtagcagtcagcacaaagcaagggatcaggtttcctctcccaagtaagataaagaacaggtatgccacctgtgttatgcatttggatagggaattttgcctactgatgctaattccagtaatgtaccagagttcttagggagaggtagttcaaaaatatgagactcataacagaaattaaaaaaaaactcctcagagcatgtggtgtaaaaattatatttctgaaagaatacattttgtgatgtacccaaattttaattttattctcaggaacaaataactgcattaaaactctataaagttaggcctcaacagaaggcaacaatactcaaagtaaagggtcgtatgagtttaatgttcttaattaatatatatttttagagttagttggattcagttgataaatttttcaattagccaaatatagtgggaaatacagaaagttgatattagtcaccaatatgagcataaatagctataaggcattaactcttttcaaacgggaattcatgttgaagaaaatgaaatgtcaacttgtttattttttatactcttgatcaaatcaatgggcaaggaaagataaaattagctttttgaattaattagttattgggctgaacaaaattattgacttattctactttcatagacatggcactgagggagggagactaacaattattgacaacatatagcacttttgtaaatgtttagtcatttaattctccagcccagtctatgatgtgggtgactttcacccccgtaagaggagggaacacgcacagggatggtgtctcaggatctcacagtgatggcaggtttgagtctaaagcctctgctctttctactgctagacccttctctctttggatggttgtctagtcatgaccctcatggagattatttaacatttcatcattaaaagtaaacattaacatcactgctttggagataaaatcactaaaatctcaggtattgtcttaagtaaaggctagacttatatttccatatactcataacgtctgcaaataaggacccaataatcatttgataatattagtaatcatttcagtggagatgatgaaaatgtacaatctccctgaaaggtggggggaggaaggaaggcaggaaggccagggggagaaggtaggcaggtgtgtttctaggtgtgttggaggactgggctatgttagaaagcgctctggtacaccaattttgagcttgcagccagtagaaaatatgagcaaaccccagatactataggggtttaagataacattgagattgaatagtctagagctaagttttgaaatgcaaaggaaacaaggaaagtgagaaaccaagtttcacttgcctgtggggtcaggaaacccattcagttgatgaatgagaaggggaaataaggcaaagcccagagaaattcacaaggtggggtcagatcttccccaggacttattttatgtggcactgcaggacttcaatatgagaatgctaggggcacttaacaagacagctgataatggcctgggatagaactgactttttatttttgcagatacatctaaaagccactttaaaacacttctaatcaatcttaattccttcactttttaattcagtgtgtttccatataaaagaactttaaaatggcaataggatatttcctctaatgatcatgaataataacctccttctccttttaaatgaagccaagaaatttattcctaatttaaactaaattctatgtagtttatcttctgtaaaagataactaatatactaataaaatctataaaattacattgaaagcatagctgttttaagataaaataggcattttttcatatacttgtgatatactaaaaatatgagaaatagagtgttctctcttaattagcattaaaactaaatggaattaattataaaatagggacttaaattctttcaatttttacattctatatgtaccaaatagttatttatatggtacatataatatttatatggtacatataaatagattaatatgaacattctatatgtaccaaatagttatttagtgaaagaggttattttaacatacaaaaaattgtatttttggacatggatttaattcctagtgcttttcaaaaaaacagatatgtttttaactatttaaaggtcttcaacatttaagattaaatgatataagaatatcagtgtcatgaaaactgtttcgatcatttgttttagcacaacaattgttttcattttaatcaaaaagattttgtcatccaagtgctccaagtagcttatatctatctatagacacagaccaagagcgaataacatcaagatcttcaggagcattgatgctagcgctcatcaattgttgaacacacacatttcctttttattttctggtactaacatcttttagatgaaactacatgaatattattagtgttcttctcagttcaagtctggccaacttgaactggactcactggtgaactgtaatttgttttttgtttgtttgtttgttttttacagaaccagggtaatggaactaggctcttccacatttcttctccactttatgggggaaagcattgtggtcagcagattctgagagctacttctatctgctaaaatttgcatatattagccattgatacgatgtgtattgtttaccaaaatataacttttcttattttattcttccaggtcttccatatttcctatattcaaagcaaatatttttaatgtatttttaataaaaataaaatgattattacaggaaataaaataataaagaggaaaaattagattagtttacactttactaacaaaaataatctaattttggtgcttaactttaaaaaaacgtgtctctatatcatgctctcgctcctcctatcctctaccatctgacaggccccagtgtgtgttgttcccccatgtctccataggtgcccatcattcagctcctacctataagtaagaacatgcagtatttgatattctgttcctgcattagtttgctgaggataatggcttccagctccatccatgtccctgcaagggacattatcttgttcctttttagggctgcatagtattccatggtgtatatgtaccacattttctttatccagtctcttattgatgggtacttaggttgattgcatgacttttttattgtgaatagtgttgcagtgaacatatgtgtgcaggtatctttgtaatagaataatttatattcctttgggtatatactgaataataggattgctgggtcaaatggtatttctggttttaaatctttgaggaattgccaaactgtcttccacagtgggtaaattaatttacattcccaccaacagtgtaaaagtgttcctgttcctccacaacctcacaagcatctgttgtttcttgactttttaatagtcgccattctgactggcatgaggtggtatctcattgtggttttgatttgcatttctctaatgatcagtgatgttgagctttctttcatatgtttgttggctgcacataggtcttttctttagaagtatctgtttctattctttgcccacttattaatggacttgtttgtttttttcttataaatttgcttaagtttcttgtagattctggctatcagacctttgtcagatggatagattgcaaaaattttctcccattctgtgggttgtctgtttgctctgatgatagttttgtttgctgtgcagaagctctttagtataattagatccaatttgtcaatttttccttttgttgcaattgcttttgatgatttcatcacaaaatctttgcccatgcctatgtcctgaatggtattgcctagattttcttctagggatttatagttttgggttttacatttaagtctttaatccatcttgagttaatttttgtataaggtgtaaaaaagggatccagtttcaattttctgcatatggctagccagttctcccagcaccatttattaaatcgggagtccttctgccattgcttgtttttgtcaggtttgtcaaagataagatggttgtaaatgtgtggttttatttctgagtctctattcgttatattggtctacgtgcctgtttttgtaccagtaccgtgctatctggttactgtagccttgtagtatagtttgaagtcaggttgcatgatgcctccaggtttgttcctttttcttacgattgtcttgcctatgcgagtttttttttgtttttaatatcaattttaagatagtttttttctgattctgtgaagaatatcattggtagtttaatgggaatagcattgaatctataaattgctttgggcagtatggccatttttacgatattgattcttcctatccatgattatgaaatgagtttccgtttgtttgtgtcatctctgatttctttgggcagtggtttgtagttctccttgaagaggtccttcacttcccttgttagctatattcctaggtgttttattatttttgtggcagttgtgaaagggagttcatacatgatttggctcttggcttgcctgttggtgtatagaaatgctagtgatttttgcacattgattttgtatcatgagactttgcagtagtggtttatcaacataagaatcttttagacagattatagggttttctatgctagatataggatcatgtcatctacaaacaaagataatttgacttcctctcttcctatttgaataccctttatttttttattttgcctgattgccctggctagaacttctaatactgtgttgagtaggaatggtaagagagggcatccttgtcttgtgccagctttcaaggggaatgctttcagcttttgcccattcaatatgatattggctgtgtgggtttgtagtctatggctcttattattttgaggcatgttccttcaatacctagtttattgagagtttttaacatgaaggatgttgaattttatcaaaggccttttctgcatccattgagataatcatatgatttttatctttagttctgtgtacatgatgaatcacatttgttgacttgtatatgttgaaccacccttgcatctcggggatgaagtctacttgatcatcctggataaacttttgtgtgtgctgctggattcagtttgctagtattttgttgagcgtttttccattgatgttcatcaaggatattggcctgaagttttttgttgttgtatctctgctaggttttggtattaggaagatgctggcctcatttaacgacttagagaggaatccaaccttttcaattttttggaatagtgtcagtaggaatggtaccagctcttctttgtacctctggtagataccaattcagttgctaatatgtctggtcctggactttttgtggttggtagcctatttattactgcctcagtttcagacttgttattggtctagtcagggattcaatttcttcctggtcaataaaactttttattctctaaattttcctctgatgacagccttggtcacattctttaggtattttgatatattgttatctgttaaatagcactctatgattttaattttaattttttctttgactaattaattaaaataagtgcttagttttttgttctaaatctttggaggctattgtttttttcttatttggtgttgtgttaactttttaattttttaaggcttttgttaagaatttcatgttttatcacataatggtcagagaatatgaactaagatttcaaaatcatgattgctagcatttcattttggcagaaaataatcatttttgtaaatgttttagatacatttgaaaagacaatatattaactaataattattgttttcatcagtttgataggccagcttctgaaaggattatgctaaagtcagactatgttttgctttttaattgacagcaattttaaaatatatttcactatgtcttttaattatgctccacattgttatgcgtgcagtgtagaatagaaacacctcaaatcaccatagtaacatagacaattcacatctatcacagtggcctaatattcattgacagttcatgtaattacagaaaatcaggtccattataaataaattatctgctatctttttaagttaaatccataaattattgtcagagatgagtagatctctcctagtttgatattttttttatttctttagacacttaggcatctgttcctataaagtcctgtgtatttgattggctcactgtaattctgcaaacattaagaaaatattaattgttaaatgcattgaaagactataccttattcaaacaataaattattacaaaggcatgcataacccaagataaaagaacaatttgaaacttaacaagaagtgaaataatgactcaactgggaagaggtgactttctgcctgattttactctttaaaaagtgtacaaagtgaaaaaaaatgaattaagctttttggcttaaaaatgtaatgcgattctaatcccacacagttatagtttataaaccggaaataacagacagaaggttgactgatgtaaaatctaaaaatgtgcagaaaagctgctttagagaattgggtaaaggcaattctgtatgtgacctattttgtctgggttcattgacctccggggaggattcatattctccatgggcacaatagcaagcctaagtagcagtcagttaattcacagagttacacgaaagttaaagaattgttgtttagtatacctttcttttccatagttttagtgtggattttccccatttttttaatgtttgttatttgatttattatttctacctttcatttccttccctcactctttcattatcccttcctctccttttttcctcctcctccctcttctgcttttttttcctctatttattggctgtttggcttatgacacatagttatcattgatccatgcaaagtgactttcatttatttagttagttatttaaaaatgtaatatgcatctatgaaaacactcttatgtccccaaaagctagtattttgacaaaaagctatatttaaacatgtatttaaattaccaacccattctcattcctcctgaataactaacaacactcctttgccttttaaaatacatttgtcttgcatctttctcaaaatgaatgaaaaaattttaagtaattgttacacatttataaaatgtattttgtatacttacttttttcatttaatatattgctgagatttatctatatttgtggccatctctgtagttcatccattttgactgcagtataatattccattgtatgaatttaccatataccatgattgatttgttcactatcctgtgggcatttagggcaattccagttgagctatacaaaactttcaagaaagatattattacaagtttactcaaacatttgcaggcaataggaaaagagggactaggctgggcacagtggctcacgcctgtaatcctagcactttgggaggctgaggtaggcggttcacgagatcaggagatcgagaccatcctggcaacacagtgaaaccctgtctctactaaaaatacaaaaattagctgggcatggtggcacacgcctgtaatcccagctactcaggaggctgaggcaggagaatctcttgaactacctgggaggtggaggtcgcagtgagctgagatcacgccactgcactccagcctgggcgacagagcgaggctgtgtctcgaacaaaaaaaaagaaaagaaaaagagggactactttcccatttattctttgaggtcagtataacctgatacccaaacaagaagaacattataagaaacaaaaattacagatccttctcactcataagtatgaatgtaaacattctaaacaaaacattagcagatcgaatccaatagtgaataaaaatgcaaattattgaaatcaagttgtgttcactccatgtttccataatgcaacatttagaaatatagaaatataattcattatggtaacagattaaaggaaaaaagattgctaacatttaaaatatattcataataaaaatattagttcatttagaatatgagggactttcttaaactgatgaaaagtgcacataaaaggcctaaatgaatatgatactaactggggaatatgggaggcattcttttaaagttaaaaaaaatgcaaaggtgttcactattgccacttcttattagcattgtactgaaggtcctagatagtacaataagaaaagaagaaaaaaatatttaagctacaagaactgttaagggagacataaaaatataaatatttgcagaaaacttgatgctttccatagaaataaaaaatctagagatcaattattaggtataataaaagaatttgcaacggtttctgaaacatgaaactactgacattttggataatttactgctgtaggacactgtcctgtgccttgtgggatgtttagtagcatctttgacctcttccactagttgccaataacatcaccttcccagttgggattatcaaaaatatctccagacattgtgccaaatatcctgtgagggacaaaatcacctcaaccactgagctagctataagactgatacagaaaaagttagctgcattttgtatactaacagcaaagtaatagataatgtagtttaagaaacattaacaatagtatcagataatattatctaggaataaatgtacaaaaatggttaggtgctatgaaaagaaaattatataactgttttaagacttataagagaaggtctaaataatggaagcaagcaatacacatggttaggaagacaatataaagatattaaatctttcccaattgatttacagattttataaattctccagtgataatctatacagtgttgttcatggaaattattaagacggttctacattttaaaaatattttaattgagacaaggtctcactttgttgcccaggctggtttcaaactcctggggtcaagcgatcctcctgcctgagcctccccaaatgctaggattacaggcatgagccaacatgccagccagattgttctacattttatatggagaagtataaagcaaagagaaggtagaacacttctaagaaagaaaaataggaaacttgtcatactgctttgtcttattataaaactttagtaatttatattgaccattggtattgtgtcaaggatggacaaatggtgaatgcaacaggataggccagaacaagatccatttacagatcttagatataaaatagaagcattgctccagccagtaggaaatagggtattattcaacaaaaagaactgaaaaaatggctaccaatatagaaaaaaagtgaaattgtatttctacctcatatcccttacctactatggtagggatgtcaactacaggtatattaaatgaaaatatcaacagcataatttaaaaactcttagtaaaaaatgtaaactaataacttttagacttgggggtacaaaagagattcttatacaagccatgagagcatcattataaagactgataaatgtgactcttgtaaatccagatggaaagagaatctttctttttccaccaacacaatggactagttgatgaaagaccttttcctagtacagcaaatttgaaaaggttggaccatatgtacacacacacacacacacacacacacacacttctctcatatatgtaatcatcactattagagatacaatgattaataaagcaaagtcctttttataatggaagtcatatatacacatttttatatgtaaagtatttaatgtaccccagaaaaaataataaagggcttcaagtacataagatgaaaagaggatttctgttacagaatgaaaatatattagattcagggtattgtaacgtattttggtttgttctcacattcattttaagatatattacctaatcttgcctaattattatatgttcttttttatttatttcctttagccaaacatttgatattttaatagtctctgtggttacttttcttacaagagattttatttaaacctcctaattcatctgcttccctgagatgcatatcacagaataatgggtcttttcctattttaaaagttgaatcagcttatttgagtactataaatgcaattatagggtctatttctgtttctcaaatagtgctattcattaatgacaatgacactttgcaaccttaaagcacattttatccaaggatcatgaagacatttccacaggagaaattactgttatctcagttttttgatagatcaagaagaagagttggttcagagaattagaaatgctattcaactacatttcttgtcgtgtctttttttttttaacacaccaaaacagttaaagccattttcaacctaaaattgggcacacatttttaatacttctatatttggtttttatggaaacgaattgtgtattttagccaaggtaaataaacatggatacttatccagtgcaattctgaagaatgattacactttctcaagtccaccttatattatatatatccacattgaagtaatgagtattaactcttaaggacaatctgaaacaagttattaatccatgccagtgtctgatactcactctacactattcttgaagctttataatgtgacatgaagtgaaacatttatttccagacttaatatgatttcacttattcatttaataactattcattgagaactcactagatatttggatgttatgggtgtctgctggaagaaatagactgacaacctgtaatgactcaaacagaatagaagtttgttttatactcacacaattatgctaaaggaatggtggattaacaggttagtagcacggatattcatgcactcacgctggaatccagcctaatgtaagttctgtcgtttttaacatgcagatgctcaaagtgtccagcataacattttcattctagccagctaggaagagaaaagaccatagaagaccacttagggggttttaatgccctcctatgtagtgcatatcacgtgtgctcacaattgattgtctgaactaataatttggccatgcctaagtgcaaggaagactggaaaagggtagcctagctatgtgcccaggaaaaagataatatttatttggatcctcatccaatagtctgagctatatatatggtggagaatgtgatagaaatattttccacaatcacaggcatatcatccagcgatttatatcgatcagttaaacaaaccaaatatttttagatatttaaaagtactatgaaggcaataatgtgtgtaatagtgaatgacagggatagaaatcaggctaaattagatatggtgatccgacaagcctctcttgatattttgggtgggatacgagtaatgaaagaagccagtcagaagatcaagtcgggaagaacactgggaagagaaaacagaaaatccctgagagagagcaaccttcatgtgcttgcaaacagaaagaagaccaggttggaaggagtacagaaaatgagcaagatcagataaataagagacttaaaggccatgataagcctttgagttttattctaagtgaaatgggaagccattgaaggatatcaagaagagggatattatttgatttgtgtttcattgacattctgactgtagggtagagagtggattgttgttgttcagtgtgaatgcaggatacctgctaagagttcagggagaggttatagtagccaagacaaggttaatgcaagagggggtaaaaagaatgggcaaattctagatacgttctgaagatagaacctgtccatgcattagatgtaagcttttttgagcagggggtggggacaggttctctctctgtcacccaggctggagtgcagtggtgctatcacagctcactgcagcttccacctcccgggctcaagccatcctcccaactcagcctcttaagtggctggaattacaggtgtatgccaccatgcctggcctagatatgggccttgtttatttttacctctggagaagtttagattttattttaggatctggtctccagatctggcatccactgagccatacgtcagtctttggttggtccacatacatttagggaagaaatgattgaaggggggttcagtccagttgaagaggaggccagatgagaaaggctcagcagtgggccttcatccccagtgaatggagtgttggagcgagggagcagtggctgctgaaattatctgccttttagacctgtgttgttttaatctggtcagcactaaccatgtgggtgttgagcagttgaaacagggctaatctgaattgtgataagctgtagtataaagtatacataagattttgaagacttaggaaataagtgcataaagtacctcaatatttctatattgattatattttgatgtgatatttttcatatgttagtttacataaagtatattaaaattaatgtcaccattaaaaaaatttagactttttaagaaaataatttacatttacaaaaaatctgaacatagagcacaatttctatattacacccctccacacacacatagctcccccaaccgttaacatcttgtatgaatgtggtacatgtatgaaagctaatggatcagtatgatacatcattattaacttagtttacattaagatttagtcctgtgtgttgctatagatgtgggtattaaattaggttttgaattgattgaatggttggacagtaagctgcttactaagcggagatgactgtctgaagaacatgtttggaaatatgtaagaatcaagcattgtgtctgagataattatcaaacaataacgtggagatacagataattggaaaagtctgcattcagggctagacatataaatttgagactcatcagtggaggaatgaggttaaattttaacttaaaatgtgtcaaagagtaaaagagaaataagaaagtggagaaaatgaacacaattttaccatgaagggagtgaaaaatgaagcagtagctgaatgagtctgtggggatagagtaacggattttagttgctttcttcttgagagctattagaactgatttgtaaattgatggggatacttctgccaaaagtctaaatttgtttatgtaaaagaaagaaaagataactgaactgaaagtgcatggaaggtgagagtgatggggccccagcaccaagggaggacattcctttgattggacctgggatatgtgttgcatcaggagggatgggagaatatgagtgtggatacaggtaggcggtagattttgtggtggaatgatgaggaagtttttgtattgctgtcttttctcagtggaaacgtatgaagcaagccggaatgacaggggaaggaaggtgttggatatgtgagggatgagaataagtcatgaaacagtcaaatattacctagaagcgagggggaaatgggccaactgggaaagtgtgataggattgcagagcaatgctgattgtccatgtgaaatctgagggtatgaatttaaagtaagaccagacagcagggacaaggtaaaggaagtgaggcacctagcatgcaaaattcagggagatagattccctctcggagtcatgccctgggcatctcatttgcctcagcctagtcctggtcttgtcagacaataaaattttatcattttattaaacaatgttcagcttcttgggtgcaggcaaagaagatgtacaattgaatttaattgtacaatgactgtgattttgatagagcaattcactggacagagagaagcgcaagagaatagagggtattccctagaaagatcatagaacatgtctaggaataggagagaagagtcactatcatgggagcgaagcagtgtgacaaaacagggtgattaatgaattgggaagtgtaggaaatcatagaattgttgcagtgaggatggaaggtggtgtccaaagaggaaacttttggagatgatatggttactagacaagacaatttccagagagtgactatgatagtatgtgtcaagatgcgtgaatgattttttttttttaaatggtgattggggccaggcatgatgtctcacacctgtaatcccagcactttgggaggcagaggtgggtggatcacctgaggtcaggagttaaagaccagccttgccaacatggtgaaaccctgtctctactaaaactacaaaaattggccaggcatggtggcacatgcctgtaatcccagctactcaggaagcttagacaggagaatcacttgaacctgggaggcggaggttgcagtgagccgagatggagccacttcactccagcctggaggacagagacaagacttcatctcaaatcaaacaaacagacaaacaaacaaacaaaaaaggtaattggaaataagtaagtctaactctgcagccaggatgttgagtgttgagtaaattatactaccaccaaagagataacagaaatgtggttggaggagaatacagtaagtcacatgctaaaggcttcagagaactggggtgagtaattgatacatgtaagagtaatcaagttcctaaataataaaactatatgattttaattcaaatatgtgaatctatttaagtgtaataaatacttagtaaagtaaattggataaggaaagagagcatgaataattgagacactgttgaaaattgctacttcctatggcattttggtcaatgacaaatctcacatatttattctttatttaagggtgctaaaaattactaaattaacccatttcatttctagctttcttatttttttcctgcttttccaatagtttaggcagtgatgatcaggaaaataaggttttggtagcatgaggggagcagggaagaataaacttgacaaaaaactgagaggattgcactaacaaagagatgtataatttttgcacataaaggtgaatgcattatttttacattgtgttttgcatggtgtaaacaagaaaatgtatactaagggggcataagtgcagccaaaggaatggaagatgatgagtgtttgcgttcattgcacatctattgtgtaccagtcatatacactgtcatctcatgcaacagtttaggaaggttggggttattatgcctgcttggcagatgagaaaacaggcttaaggagggtaacttactcagatcacacggataattggtagagccagaaagcagactctagtccctgcatcccaagcccatattcttcccctgcgcaatattcaaaagagccaacatttgaaaaaaaaaaccttcattgaatatatcattttccctacaaaaccatgttggagtgcttgagatgcctacgaataaaaatatactttttcacacatttcttattgaacagaaaatattcaaggagatgtgtgacatctaagggtagcacctgatgagtaaacattacctcacaactccatgttgtttgtttccatttctgcactagcacatgtggatggaaaagtttgttttaagacagcatcttgctctgtcacctggagttggagtgcagtagcgcaattctagttcactgtaacctcaagctcctggtctcaagcgatgtttctaccccagcctcctgagtaatgaggagtacaggtgcatgccaccatgcctggctaatttatcttttggtagagatgggggtctcactgtgttgcccaggctggtcttgaactcctggcctgaagagatcctcctacctcagattcccaaagtatgagccactgcacccagtgtgaaaaccattttaaaaaattaatccacttttggctgggcacatttattcatgcctgtaattctggcattttgggaggccaaggagggaggattgcttgaccccaggagttcaagaccagcctgggcagcatgcaaaaccctatgtctaccaaaaattacaaaaattagctgggcatggtggcacaggcctgtgatcccagctactcaggaggccaaggttggaggatccctcgatcctaggaggcagatgttgcagtgagccaagatgacaccaccgagttccagcctgagtgacagagggagaccctttccaccaccctcctcaaaaacaaaattaatacacatcaaaatttctgaaatacctaacgtataggatggagagaaataaaacaggaaaatgtgagcataatttatcatgtaaaatatgtgtgaatattgcttaatcaaatatatttgttatatttctttttttaatgtaaatagcatttcttttttttccttttttcttattatactttaagttctagggtacatgtgcacaacgtgcaggtttgttacatgtgtatacatgtgccatgttggtgtgctgtacccattaacttgtcggtatatctcttaatgctttccctccccacttccctcaccccacaacaggccccagtgtgtgatgttccccttcctgtgtccatgtgttctcactgttcaattcccacctgtgagtgagaacatgcggtgtttggttttttgttcttggggtagtttgctgagaacgatgatttccagcttcatccatgtccctacaaaggacatgaactcatcattttttatgactgcatagtactccgtggtgtatatgtgccacattttcttaatccagtctatcactgatggacatttgggttagttccaagtctttgctactgtgaatagtgccgcaataaacatacgtgtgcaagtgcctttatagcagcataatttataatcctttgggtatatacccagtaatgggatggctgggtcaaatggtgtttctagttctagatccttgaggaatcaccacactgtcttccacaatggttgaactagtttacagtcccaacaacagtgtaaaagtgttcctgtttctccacatcctctccatcacctgttgtttcctgactttttaatgatcgccattctaactggtgtcagatggtatctcattgtggttttgatttgcatttctctgatggccagtgatgatgagcattttttcatgtgtctgttggctgcataaatgtcttcttttgagaagtgtctgttcatatcctttgcgcacttgttgatggggttgtttttttcttgtaaatttgtttgagttctttgtagattgtggatattagccctttgtcagatgagtagatggtaaaaattttctccccttctgtaggttgcctgttcactctgatggtagtttctttcgctgtgtagaagctccttagtttaattagatcccatttgtcaattttgacttttgttgccattgcttttggtgttttagacatgaagtccatgcccatgcctatgtcgtgaatggtattgcccaggttttcttctagggtttttatggttttaggtctaacatttaagtctttaatccatcttgaattaatttttgtataaggtgtaaggaagggatccagtttgagctttctacatatggctagccagttttcccagcaccatttattaaatagggaatcctttccccatttcttgtttttgtcaggtttgtcaaagatcagatggttgtagatgtgtggtattatttctgagggctctgttctgttccattggtctatatctctgttttggtaccagtaccatgctgttttggttactgtagccttgtagtataatttgaagtcaggtagcgtgatgcctccagctttgttcttttggcttaggattgtcttggcaatgagggctctatttttggttccatattaaccttaaagtagttttttccaattctgtgaagaaagtcattggtagcttgatggggatggcattgaatctataaattaccttgggcagtatggccattttcatgatattttcttcccatccatgaggatggaatgttcttccatttgtttgtatcctcttttattttgttgagcagtggtttgtagttctccttgaagagttccttcacatcccttgtaagttggattcctaggtattttattctctttgaagcaattgtaaatgggagttcactcatgatttggctctctgtttgtctgttattggtgtataagaatgcttgtgatttttgcacattgattttgtatcctgagactttgctgaagttgcttatcagcttaaggagattttgggctgagacagtggggttttctaaatatacaatcatgtcatctgcaaacagggacaatttgacttcctcttttcctaattgaataccctttatttctttctcctgcctgattgccctggccagaacttccaacactatgttgcataggagtggtgagagagggcatctctgtcttgtgccagttttcaaagggaatgcttccagtttttgcccattcagtatgatattggctgtgggtttgtcataaatagctcttattattttgagatacatcccatcaatacctaatttactgagagtttttagcatgaaaggcagatgaattttgtcaaaggccttttcttcatctattgagataatcatgtggcttttgtctttggttctgtttatatgctggattacgtttattgattttcgtatgttgaaccagccttgcatccctgggatgaagccaacttgatcatggtggataaactttttgatgtgcttctggatttggtttgccagtattttattgagaattttcacagcgatgttcatcagggatattggtctaaaattgtcttttttggttgtgtctctgccaggctttggtatcaggataatgctggcctcataaaatgagttagggaggattccctctttttctattgattggaatattttcagaaggaatggtaccagctcctcattgtacctctggtagaatttggctctgaatccgtctggtcctggactttttttggttggtaggctattaattattgcctcaatttcagagcctgttattggtctgttcagggattcaagttcttcttggtttagtcttgggagggtgtatgtgtcgaggaatttttccatttcttctagattttctagtttatttccgcagtggtgtttatagtattctctgatggtagtttgtatttctgtgggattggtggtgatatcccctttatcattttttattgcgtttatttgattcttccctcttttcttctttattagtcttgctagcggtctatcaattttgttgatcttttcaaaaaccagctcctggattcattgattttttgaagagtttttttgtgtctctatctccttcagttctgctctgatcttagttatttcttgccttctgctagcttttgaatgtgtttgctcttgcttctctagttcttttaattgtgatgttagggtgtcgattttagatctgtcctgctttctcttgtgggcatttcgtgctataaatttccctctacacactgctttaaatgtgtcccagagattctgttatgttgtgtctttgttctcattggtttcaaagaacgtctttatttctgacttcatttcgttatgtacccagtagtcattcaggagcaggttgttcagtttccatgtagttgagcagttttgagtgagattcttaatcctgagttgtagtttgattgcactgtggtctgagagatagtttgttataatttctgttcttttacatttgctgaggagtgctttacttccaagtatgtggtcaattttggaataagtgtgatgtggtgctgagaagaatgtatattctgttgatttggggtggagagttctgtagatgtctattaggtctgctttgtgcagagctgagttcaattcctggatatccttgttaactttctgtctcgttgatctgtctaatgttgacagtggggtgttaaagtctcccattattattgtgtgggagtctaagtctctttgtaggtctctaagtacttgctttatgaatctgggtgctcctgtattgggtgcatatatatttaagatagttagctcttcttgttgaattgatccctttaccattatgtaatggccttctttgtctcttttgatctttgttggtttaaagtctgtttcatcagagactaggattgcaacccccgcctttttttgttttccatttgcttggtagatcttcctccatccctttattttgagcctatgtgtgtctctgcacgtgagatgggtctcctgaatacagcactctgatcagtcttgactctttatccaatttgccagtctgtgtcttttaattggagcatttagcccatttatatttaaggttaatattgttatatgtgaatttgatcctgtcattatgatgttagctggttattttgcttaatagttgatgctgtttcttcctagccttgatggtctttacaatttggcatgtttttgcagtggctggtactggttgttcctttccatgtttagtgcttccttcaggagctcttgtagggcaggcctggtggtgacaaaatctctcagcatttgcttgtctctaaaggattttatttctccttcacttatgaagcttagtttggctggatatgaaattctgggttgaaaattcttttctttaagaatgttgaatattggcccccactctcttctggcttgtagagtttctgccgagagatctgctattagtctaattggtttccctttgtgggtaaccctacatttctctctggctgcccttaacattttttccctcatttcaactttggtgaatctgacaattatgtgtcttggagttgctcttctcgaggagtatctttgtggtgttctctgtatttcctgaatttgaatgttgtcctgccttgctaggttggggaagttctcctggataatatcctgcagagtgttttccaacttggttccattctccctgtcactttcaggtacaccaatcagacgtagatttggtcttttcacatagtcccgtatttcttagaggctttgttctttcctttttactcttttttctctaaacttctgttctcgcttcattgcattcatttgatcttcaatcactgataccctttcttccagttgatcaaatcagctactgaagcttgtgcattcatcacgtatttctcgtgccatagttttcagctccatcaggtcatttaaggacttctctacactggttattctagttagccatttgtctaatcttttttcaaggtttttaacttctttgcattgggttcgaacttcctcctttagctcagagaagtttgatcatctgaagccttctctcagcttgtcaaagtcattctccatccagctttgttccattgctggtgaggagctgcgttcctttggagggggagaggtgctctgatttttagaattttcagcttttcagctctgttttttccccatctttgtggtttttatctgcctttggtctttgatgatggtgatgtacagatgtggttttggtgtggatgtcctttctgtctgttagtttccttctaacagtcaggaccctcagctgcaggtctgttggagtttgctggaggtccactccagaccctgtttgcttgggtatcagcagtggaggctgcagagtagtgaatattgctgaacagcaaacgatgctgcctgaccgttcctctggaagtttcgtctcagaagggtacccggccgtgtgaggtgttagtctgcccctactgggaggtgcctcccagttaggctacttggaggtcagggacctacttgagaaggcagtctgtccgttctcagatctcaaactccgtgctgggagaaccactactctcttcaaagctgtcagacagggacatttaagtctgcagaggtctgctgccttttgtttggctatgccctgcccccagaggtggagtctacagaggcaggcagacctccttgagctgcagtaggttccacccagtttgagggaatccgggctgctttgtttacctactcaagcctcagcaatggcgtgtgcccctcccccagcctcgctgctgccttgcagttggatctcagtctgctgtgctagcaatgagtgaggctccgtgggcatgggaccctctgagccaggtgtgggatataatctcctggtgtgccgtttgctaagaccgttggaaaagcgcagtattaaggtgggagtgacctgattttccaggtgccgtctgtcacccattcccttggctaggaaagggaattccctgaccccttgcactttccgggtgaggcgatgcctcgccctgctttggctcacactcggtgggctgcacccactgtcctgtccacactgtccgacaagccccagtgagatgaacctggtacctcagttggaaatgcagaaatcacccgtcttctgcgtcgctcacactgggagctgtagactggagctgttcttatttggccatcttggaaccccactctgtcaaagttatatttcttacctgtgttgttattaaaccttgataaattaatgactatattaacagacatttgtcatttgaaatttttttgtggacaaaaaaaaaattcgccacttaattctgtttctcagagtggccagtttcagtacaaacaatgacatttttaaaagatggcaaacttgtaggaattattaaacagctaatgagttagttccttatggctactcaacgatgctctttctacattgaccagagttccatggcagtcatttgaaatgagtcaatatgtaatggaatcagttcttcctgaaaaagggttgaagtaattcaactgcaagcctaatttaagactagaaatcgcattaggaaaacaagatgcaagggtcatcagtaataaaaaccacttcagctactggtgattaactcagagcccattcacagatatgtcaaagtttccccgtggtttctaatgtcacattaataacaaagtgagaggatttatttggtctctccgtttgtgaatataaaagatgacagaaaatatacatgaagttcataatgtcatgaagagggaagcatggatttgcttgggatcattaggggatgcctctttcatgctttcctataatttattgattacttgctcagtactgaacactgtctttgctgcagtgcttacaaagataatagatacttttgcctttcttaagaagaccatagttttgtgaagattgcagagggtccacccagtgttgagcacataataggctctaaaaaagtatctgtgcaataaatgtttggtcaggtacagaatggatagtaagtctgtggaatgttgcgagtgcttcgatattgcatgttaggacataaagaggtggttgggcaccttccccagggttggagtaagattaagcttctgtaagtgcatgacccttgagcctcatcttgaaggaattatatagagaggggtaaggaggaaagagaatgggaaattagagaaaatagcctgagcaaagacagaatggtgagacagagcataatgaatttagggaccggaattttaggtataggtggcattgtgttgaaagagatcagagattagtgagagtgacatcaggaaaacttatacgctcactgagtttatatgttctcatatagacagtggctctcaaacacaacatttccacaaaacaacaaaagaaattatagttaatacgtaatatgatgtactaaatgttttatatatattgattcatttaatccttatatatccctctgaggtgggaattgctattagcccactatataactgagaaatgtgagatatagggaaattaagaaatgcattcaagacaccacatcaataagtgacagaggggcgtttgaacccaatgatctgtctccagaacccacacttataactgctttagaatattgcaccttaatacaatgtcaaatttagtgtaacttgattttaataatgatattcaaagtatctaagttggaaattattatattttgtgacaatgtggctctctaatgagctctcttgagaggctttcttgacttggatatagaaacagctaacacattaggaattatgtataacttagggtatattcatggtaatgtgttatacaaattacattatttcatcttaggtactgttattgtaaaaaagattgggaactgctgttgtagaagataaggagtcattgagtcaaggagttgacaacttgggagattttaagtagagaaaattaagtatccctttattgaggagagaatatgtaattaaaatatttcaaagtgatatataaatgtcagaagttgatcatgttaatgtgaaattctcaacatacgtgtttttccagccagaaatatcttcctcatttgaatttcaataatcttttgtctagccatcacttagagaactttcaacatcctttctattactatgtgttggtgtgtactgaaagtaaatgtgcagtgaataatttatccccatgcactgttctaagcacttgacaagtgttgattatttaattctcacaacaactctatgagaaaagtatcattattactcccattttacaggtgaagaaactgaggatttaagaggttaacctgctcgaggtcactaggagctgagaaaggttttggtcaggtttggcaaataggttctacttccatatataaggagtagctaagatagtactgcttgattggagagctcttattttattccctgagtaatgtacatctatcaatttatatataaagtcatttctcatgtgaattaataataatagtaataataatgtacatatttacagctcttttaggacttcaaaatttattcatatttattgttaagtctgtgtggtaagtgaaggaaaagggacatacacaagttgtggaaatcaatggggaatggagtgagcctggacatggaacttccagttccgggagcagagctctttcttccatgcggtgccatctcttgcagcctcagcagttcctgatgataccagatgtctgtagtctcatcagagaacttacaccatgtttagatttttaggaagaatcaagaaaacagaatattagacatctgtccattaattactggaaaagtattcacattgttgttatgtgactctgattacatttatttacaggttactgtgtttttttgataaagtcatcgatttgtttgataagttaaatattttacaattttgtgatggctggtaattaggtaaacaactctacagatagaataagaagctcattataagatgggaatatgtacagttgacgtatataactattagttatgtatacttttggagaatacagtatgagacagagataacaagaaggggaaaccctctagcacagtttagaaattaaatccaatatcctgtgagaagagagtcagataaaaggcctgcagagggaagacagacaccaagaaaagggattggtgtcaggtgaatttttcaagacaggaaagaataataataataaaaaaatgtagagaagcctaaaagctgttagagaaaaggaaagtctgtatagatagtgaagctagatggaacaagaagacattggggtggtgatccatttctactcttcccctgtaattacataaaagttaataagagggaaaataaaagtgagcagaaactattaagagaaaagatgaaaacttccgagaggaatggagtttagaaaagactacagttcttgcaccctgctgctctgccactgttagacctgtcactgtgaagggggagaacaatcatgatctgggcagagttgggacttcccatagatcaatgcctcacccattgagaggttcccaacagtagaccacattgatatactcttgggcagaggtagcagaggcacaggaacggtgctctctaactgctttagagagtttggaaaaagcaaaactcaggattctggccagaaagttctcctgccatattttgaattgctgtttgtagttcgtattgtacaatagctgtcatgcttcaaaacatttacatttttctctattaactatcatactatgtagccagtattgaatattcagcctatcaacttttatttatttagctgttatgtgcattgcttaacttggatactcatcatttactttctaatatgtacaataaagcacgtcttactcgtgtgtgtatgtctgggcttctttttcatgtaaaagatattatgctatcaagaatgaccttgtatggattgcaatctttgcatcacttacttcacacaatatatttttatctaccattccttctaaaagaaaaataaacccagtgggctatcttactaaaactttattaacattgttttctaaatctttataggcagtgctggcactcctgtcacttttaatgaaaacggagatgctcctggacgttatgatatcttccagtatcaaataaccaacaaaagcacagagtacaaagtcatcggccactggaccaatcagcttcatctaaaagcaagtatcgtcataaacatatattaatgtatatagctctccaggagggatgctttatttttaagtgtataacttttgctagaataggttttccccataaataaactcttagaaaatgtatgacttgattctctcttcaatttaaaaatgttatggacattcttcagcctctttagagaaatctcctgatatctgtaagaatttaatgaatgatctgatttttttcctgcagttgactatacccttagataaattttgcccttttatgaaagagtcatttgttgtaatctttgtacattttttgtatgtctgtgtgttggaggtggtgtggaatcgactgaatatgccctcatttataaatttgggcttaaaaaaaggtcacatctggctaacaaggtgaaaccccatctctactaaaaatacaaaaaaaattagccaggggtggtggtgggtgcttgtagtcccagctatttgggaggctgaggcaggagaatggcgtgaacccgggaggcggagcttgcagtgagccgaggtcgcgccactgcactctagcctgggcgtcagagcgagactccgtctcaagaaaaaaaaaaaaaaaaaaagggcacatcacttttgccacatcacaaggggagaccttctggctatatctggttgatagaagtgaatcatactctgtgtttatattgcctctttcagttgcaacaccagggaaggttgatgtatctaagggtgatgttcagattacttaacagcctttagagctacctgctatttttgtctaccgcaggcactcttcaggtccagtgtccattaattctgcagtttccacaagtggccatgtgagggcgacttgaagagcccagccggaagcaagttcccaaggcctgggattggtgcccaaaagcacctgggcatttgcctgccaggtgccgcaccatcacccagagttctgtttctttcggctggagtctgatgggtacccagtggggttagcacgtggggatggcagtacggaggaggaacttcatcaggtgtctcaggctggtgggcactccctcagaggagctctcttagggcagaggtctttgggggatttggggagagctgctaggtaccatcactcttcagtcctaaggggctctggaacaggaaaccaattctgaacttgatggataagggaggcccaggaaatcagtgcacagggctgtggatgctggggtggggagggcaaggagggcagcatctacttaccaccaggtgaagaattatttcacattttaacagccctttgccccatattagtgcacactggcttttttaagtatagagaagtatggagcacgttctgtagtctcagtcgaggtttagagttcattcatccagcatctcttccacagaaaagtaggacttttcacagaaatttggtggccaggaaataactacaagaacagtagacatggacacaggaaggggaacatcacagtctggggactgttgtggggtggggggaggggggagggatagcattgggtgatatacctaatgctagatgacgagttagtgggtgcagcgcactagcatggcacgtgtatacatatgtaactaaccttcacattgtgcacatgtaccctaaaacttaaagtataataataataataaaaatacataaaaaaagaacggtagacagtaggatgtttttaaaatgcttcaaataaactaggaaaatattcttcttctgttctgttgttttaatgtgtaattcactctttcctctagcaaaaaacatctcctcttcttgattctcagagctaccataatactgtgagagtgtatacatgctttctcatgtttgaacctaatcagaagacatcaatttgatatttttaatcaatttttttttgttttgtatttccaaatatgtcccccaaagtgatatgtctatgcagcaccagtcacccaagttctcagaaaattagacgatgagaaattacaaaactagggagattatgatttattttcttcctcataattattgcagctatgcatttaataatgcacagacagcttatgtttctaactattgtagtgatacgtaaggccacatatcaatactttactacttctaggtgcttcatgaaatcttatccattgttctgcaatccatattgacatttattgaaacacaactttgataatgccacaggttattgataatcaatagctttttgacagaagcccttttgaaagaggacctataggaaatgaaataagacagaaatgttttgacaaggtctaagataggaaagctttttatctgacttttattaatgtcggactgcctatcattaatatattctgatgattagggatttacacagcaaaatccagtgtttgagaaatatatacactaacatacaacaccattacataacataattttacacacaagtacacatatatacacatctcgccatatacgcataatgtagttataaacttcctattgaatctcaagctgctcttttatgtacatttaacagtgcatgaaagttttatgtttatgactgtattatcgttcataaaatgtatcaaaacaatttgtgagaattatttctcatgcatgattatgatcatttataactagatagcgttgcgggttttaccgaaatggaaaatgcatctcttagaagaaaaaacaataaattgcactgtggagagaggttataaattaagaattgaattctgaggattatcaggacaaatcaaatgacttttatccttaggagttggattagtcacctgcttgaaggtggagtagtagagtgcttggcaagctaccaacttgttaatgttttgcttagatctatggcaaagcactaaacaaattatttgcctcagttttatcatgtctaaaatgaaaacagtagcacccaccttatatggttgtaataagcattaaatgaagtaatacaacaaagccctttgcccagtgtttggtacacctgagatctataaatgttacttatgattaattcagtatctcaatattctatgtggtcagtgagacacctgatagataatgagtctactgggcaaagcgaaggtcccattagaagagggacttgagtttgtgtgagaaagttcagagacagtctctgcatttaaaatgctgactgtccccacagccagtcctttctgcctgtctttgacattggccttaatacttggaaaatccctctgcactcaaaaaacaaactttatatgagataaatttattttcctgtgctaccatgtgaatagatatcatcacctaggcagttattttttgaatagatttgggaaattcagtctgtgctcatactctgttaaaaggtgttgagactatagtgaatatgtgaaccctgttctcagggaactcacagattagaaggagagacaaacactcggaccaaccactctagcgcaatggagcaggtgcactgatgaaggtatatatatatgggtttgcaatggcagcctagagagaggttgctaatctggcctgacctctggtgggaattgtcactgtggccaaaggaggatactgacaggaggatttactcttatccatatactgtatctcttcttgttctattaaaccagatttatgatagctttcacattctcagtggtaagcatttatcagtcagttattggattgaactctgcttgttttcaaagagccagtttttctggctgaattcaaccatagtataaatttgtacaaagagggtatatggttaggcatattggaatgcagtaaatttgccttgaatatctcttagtggattgaacgaattttttaaataagtagattattctttttctttttcctggaaaatatattaggtatttcatttcctcaaaagcattatctttattgttccaaacattactgtttcttttttctttttatgaaactaacatatgttcttaatttggcaattacaatcagcataatttgtttaagttttctactcagtaatctcggcccacacatgaggcatgtattgtctacctgagagtggatttgaacaatgagtctctctattttattaggcagaatctctcaagagacaggtggtccttattagtgattacaaaacatattgtaacctagaggttcagagtaaacagaagagcctgaactgtgaaaagaacagccatatgctgctctgtgtccacagggagaacgtgtactggggatgctgtatgggccaaaaataactcggggctttttttaatgctttttccaaccagatccactttttcttgattactgtaggaatgaaacatatgtttttattggtttcaacatattattctttttataatcaaggaaataagttgaatataaatgataaataacaaagaatagtgacttcacaagggtgtcccaatctgcccaattattagtggcagagtgtaatttggaagggtgatttgaaggagaaactgaattaataattttgaacctgatttaattttcagtggatgactccatagaagaaaaacttctgacaggatactgagctttgagcctcagttttctcatctaagtgggataatagatattattatgaatagtagatgcattgtaatatggtgatcaagaaaaagatctcaaagtcaaacagaagatgtttgaattctgacctttcattcatgagctgtatagccagccttgggcatgtgacttagactcaggttctttatctaccaacttgatagagttctgagatcatcaaggaaattgcatgtacaaaaatcctagaacattgactggtacatattaagtattgaacgaatgtgataataataatttttgttttgttttgccagtacaaccagcctactatagaggacctatagtgggtatttcagtatgaaatcaaactgaagctgtatttgcagtcttctttctgtctttattctgatgttctgaatagggagtagctgtaaagagaggtatatgcaccatgataacttgtctgtctacacaataagcccaaagtatttgttttgatatttaaaaaagtagcctctgtgattcaaatgctttgggaaaaactaaaacttgagcaaactttctgatggaattttgctccattaaattggtctttaccacatacctatagtatagtatttattttaattgaatgtatgtattttcctatagatgatcagttaaatatatacatgctatatgtatgtatactggggcttccttggcttgcttggattaaaaaaagggaaaattcctgagtctccccatttgtctcagggattttgtttttattctggataaacaactgtttttttttaatgcaaaaatcattactttcattaatttcatagaggaacagcttttatataatgaaaaatattaaaatggttttgaagtaacaatggactgaatagagttgaaacagggtttgagagaagacttgacctttgcttgctttgacagttaggaaacatgcattttctgtttgcctctgtttccctgtttgcaaagttgcttacatgtgaaaatgctctttcctatgatacatatatacacaaacacatacatacatacatatatatatgtacacacacatattcaccctatgaaataagtattatatgatgcactccttttcctacatagcataagtgtgagtcaattccctgggccctttctctatattctgttagaactttaaatgccactctatttgtctgttgttggtgtataagaatgcttgtgatttttgtacattgattttgtatcctgagactttgctgaagttgcttatcagcttaaggagattttgggctgagacaatggggttttctagatatacaatcatgtcgtctgcaaacagtgacaatttgacttcctcttttcctaattgaataccctttatttccttctcctgcctaattgccctggccagaacttccaacactatgttgaataggagcggtgagagagggcatccctgtcttgtgccagttttcaaagggaatgcttccagtttttgcccattcagtatgatattggctgtgggtttgtcatagatagctcttattattttgaaatacgtcccatcaatacctaatttatagagagtttttagcatgaagggttgttgaattttgtcaaaggctttttctgcatctattgagataatcatgtggtttttgtctttggctctgtttatatgctggattacatttattgatttgcgtatattgaaccagccttgcatcccagggatgaagccaacttgatcatggtggataagctttttgatgtgctgctggattcggtttgccagtattttattgaggatttttgcatcaatgttcatcaaggatattggtctaaaattgtcttttttggttgtgtctctgcccggctttggtatcagaatgatgctggcctcataaaatgagttagggaggattccctctttttctattgattggaatagtttcagaaggaatggtaccagttcctccttgtacctctggtagaattcagctgtgaatccatctggtcctggactctttttggttggtaaactatcaacagacaaacagagagccaaatcatgagtgaactcccattcacaattgcttcaaagagaataaaatacctaggaatccaacttacaagggatgtgaaggacctcttcaaggagaactacaaaccactgctcaaggaaataaaagaggatacaaacaaatggaagaacattccatgctcatgggtaggaagaatcaatacggtgaaaatggccatactgcccaaggtaatttacagattcaatgccatccccatcaagctaccaatgactttcttcacagaattggaaaaaactactttaaagttcatatggaaccgaaaaagagcccgcatcgccaagtcaatcctaagccaaaagaacaaagctggaggcatcacgctacctgacttcaaactatactacaaggctacagtaaccaaaacagcatggtactgctaccaaaacagagatatagatcaatggaacagaacagagccctcagaaataatgccgcatacctacaactatctgatctttgacaaacctgagaaaaacaagcaatggggaaaggattccctatttaataaatggtgctgggaaaactggctagccatatgtagaaagctcaaactggatcccttccttacaccttatacaaaaatcaattcaagatggattaaagatttaaacgttagacctaaaaccataaaaaccctagaagaaaacctaggcattaccattcaggacataggcatgggcaaggacttcatgtccaaaacaccaaaagcaatggcaacaaaagacaaaattgacaaatgggatctaattaaactaaagagcttctgcacagcaaaagaaactaccatcagagtgaacaggcaacccacaaaatgggagaaaattttcacaacctactcatctgacaaagggctaatatgcagaatctacaatgaactcaaacaaatttacaagaaaaaaacaaacaaccccatcaaaaagtgggcaaaggacatgaacagacacttctcaaaagaagacatttatgcagccaaaaaacacatgaaaaaatgctcatcatcactagccatcagagaaatgcaaatcaaaaccactatgagataccatctcacaccagttagaatggcaatcattaaaaagtcaggaaacaacaggtgctggagaggatgtggagaaataggaacacttttacactgttggtgggactgtaaactagttcaaccattgtggaagtcagtgtggcgattcctcagggatttagaactagaagtaccatttgacccagccatcccattactgggtatatacccaaatgactataaatcatgctgctataaagacacatgcacacgtatgtttattgcggcattattcaccatagcaaagacttggaaccaacccaaatgtccaacaacgatagactggattaagaaaatatggcgcatatacaccacggaatactatgcagccataaaaaatgatgagttcatgtcgtttgtagggacatggatgaaattggaaatcatcattctcagtaaactatcgcaagtacaaaaaaccaaacaccgcatattctcactcataggtgggaattgaacaatgagatcacatggacacaggaaggggaatatcacactctggggactgtggtggggtggggggaggggagagggatagcattgggagatatacctaatgctagatgacgagttagtgggtgcagcgcaccagcatggcacatgtatacatatgtaactaacctgcacaatgtgcacatgtaccctaaaacttaaagtataataaaaaaaaaatgccactctagttcttaactttgtacttgattatgaaaatactttgttctgtttcctttccttgcaacaagatgatttttaaagctgtgtatttgtttattagatgctaatttattctttcaaaaagtcattttgaggtcattacttatatctctgtttataaaataacaagataaaagataacaatatgatttggtagagtcatattattcacacattgagcaagtgttaaggtgattaaattttaaccacatccttgccaagcccagaataagtactcaataagtgtgtatttaatatgtcatgaataatatgctgatcttttctacatattgactgaacatagatggatgatccaagattatctattaggaagtacactcatgtacagattatttattcagtgactgttccctgccaggcaggatgatagtccatggcagggcatcagtataagatatacagtcatccctatgtagatatggggaattggtttcaggaccccacatataccaaaatctatgcatgatcatttcccctagtcagaagccatgcatatgaaaaatcaggccttcttataggcaggtttcacatctgccaatacaatattttctgtctgtgttcgattgaaaaaaaccaatgtagaagtagacccatacactccaaacccatgttgtccaagggtcaactgtatttccagatatcaacggatttctaatttattaaagcaaccatatactcataactacaataattgcataattatacaggtacagattaaataataaactatttgaattcagtggtttgaatgtgaattcaaggaatcaatgatcaccttaaactagggacactggatagtttcttgacatagatgaaattcaaactagactttaaattcttttaatggtcaaaatatttggaagaacatataggccattgaaaaagcatccattcgtccatccaccattcatccattcatatattcattttgtaaaacagcacctccagtttgccaatgctctagtgcaggctgggatggtttagaagtgtcttagattcagttcattgtgtcatccatgaagtaacaggactatgcgggttcagcatccaaggatatgtctctttcatgagcccatactaatacatccagctgtgttcctttattcttttttaactttaaacacacattcattattagcaaagtatgatcagcattcacaaggaaacatattctctcttggtctggaggctgaggaactagagaactgtgttggtgtatctggtttaaaacatttcagtacaaatgggtcaaaaagaccatagtagttagatgcctgatagatgcagcctgactcttaccttccgttctcagagaagcaagataattggaggcaaggaacctgttctacttggctttatgtcttcaatgattagtataatatgggacttactaaatgttcatgaataaattaataaaccaaaaatttaaagcactgttatctttacaaggccaaaaaggtgagctgaccctatgataactgagataatgtataaccgaggagcacactgtagtaagggtagagctaggagccattgtcaaggtaatcaaggacaaactccagaatggataatcacgttaaaagatccttgcaatcaggccagatagaatctgagggaaagtccaaagttacacacaggagcaagaggagtgcatgtatgtgacccagataaaattctgtggggcacgttgttactattaccactggcttttattcttgcccatgccatttgcagacctacaaatactgaagacggccttagagttactgagtgacttctgataactgtctttgaggagcatctgccattgaatgggcagatctgttctgcttacacaaggacttcataatgcaggttgttaagtacaataatacagatgaggacgttgtctaggttttcatacctagataaaggctcagtttctttacgggactgagtatgattctgagctcccagaacagaggaccatcttatcagagaacattgtggggaatgaagagagatagcttgaacttaaattctataagacctcatataccatgagaacattttaagatatttttgagctacactgagtttttcaatagagagatgctcacatttaagcttcaggagaatgtctttggcagcaaagtgcagattagctggagaagaggtagtccgtgagctaagtcaaagccgtaattaagattttttttttctattttacttaattttctgatagattctctcttgcctatttatctactttgttccagccttaattcataaaatatttcgaaaggccttactaagatacatttatcacagtaggacaaataaataagtgaggacattaggaagaaggaataaagggtgttagtgaattttagttcatactcaacttagattttcccaataataataacaaatagattcatctaggctgttcagtagagtaggtgaagtaatcttgttactattttaagaatatacaaaactatgccataccaaatctgatttaatctgattaggacttgagaagctgaattcagttattagatccagttggaggcaggtttctagggcaatctactagtattcagggtgtctagttgtttgtcagggagaaatagggcattaaaaacctatcattataaaaaaaataggaaaaaaccacaagaatttaattagttatttaaataataactgaaaataacagaaatagagaagaaacaaaaaaggtagaccacatatgactgagaacatgtgatattttgtgaatagaatgatggttagcaaaggcagggaggagtgggggaggggaattaagaaggctaggtagtgggtacaaaaatatagtcagctagaaggaaggagttctagtgttcaatagcactataggatgatgatagttaacaatactttattgtataattgaaaatagctggaagagaagattcagaatgttcccaacacaaagaaatgataaatgtttgaaggagatcctaaatcccctgattttatcattacatattgtgtgcatgtatcaaaatgtcatatgtaccccacagatatgcacaactattatgtatccatgaaaattaaaaagttcaaagatagtggtttaattggaaaaggaaaatcaaagaaagtgatgctgcttaaagacataacgtgaagcaagaaatgtgtttttataccagcaccaaagatggataaaagaagctagtgactctagacttttatggagataataaagtaataaaaatgaaaataaatgatattttaatccttattttaaccttgggaggagtaaaataagtacaattttaacataacaagtagaataaataaggttaaaataaggttataaacataaaatgaagctctgggatggaggaataactggtaaaaagtcattttattgtggtagatttacatgtgaatcctgtatcctagagtacttttaaaagttcagtgggtttcatcagcgttatgtgaaatctaaaacatacaagataattacaactaagaactgaaaagtattgtatattaattaaaagatgtagcctcccattgtagataggccagtgatttataaaagcaagacaaaagaaaaattaatgtttattgactgaatcaaaaatttctcgtgacacctttcctcaaagcttccaataattaactgagggaggagagccaaaagctaggatcctcctaaactccccgtagtatgttaatatggttatggatgccatattttcaaatgaagttacagaaatatgcaattgtgtataatctcaggggtttgaggtataaaataatgttttctttttagattatttcgctttgttgtatatttaaatgatgaaatatacaacaaggacatagaaatgtactaaattttactagtatttgattgctttcatttgttataaaatcatttttattgatgttattgtgagataattgcagatacatttgcagttgtaggaaataattaagattccatgtcccttttacatagttttttccaatgataacattttgcaaaattattgtacagtatcgcaactaggatattgacatttatataatctatcaatcttattcagatctccctagttttacttgtattcctctgtgtgtgtgagtgcatatgcttatactatgtatttagctctctgctattttgttaaccatttatatctgcgtatgtgctaccacagtaaacatacagaacatttctgttatcgcaaggattccttatgttgtcttgttatatccatattgatttctctcccatatgcctcactccccaatgcctgacaaccactaatgtgttctctatttacataattttgtcatttctagaatgttatacaaccccatcaataagtgggcaaaggacatgaaaagacatttctcaaaagaaggcatacatgtagccaacaagtatatgaaaaaacgttcaactttactaatcattagagaaatgcagatcaaaaccacaatcagatgccatttcacatcagtcagaatagctattattaaaaagtcaaaaaaagcaggtgctggtgaggttatggagaaaatgggaatgtttatacactgctggtgcaaaagtaaattagtttagccattgtggaaatcagtttggagatttctcaaagaacttaaaacaggattaccattcaccccagcaatcccattactggcgtatatacccaaaggaatatagttttggtttttggggtttttgtttgattcagagtctcactctgttacccactctggagagcagtggtgctatctcagctcactgcaacctctgcctcctgggttcaagcgattcttgtggctcagcctcctgagtagcctgtgccaccacacccatctgatatttgtatctttagtaaagacatggtttcaccatattgtccaggctggtctcaaactcgtgagctgaaatgatctggctgctttggctgcccaaatgttgggattacaggcatgagctactgcgaccagccggactataaatcattctatcataaagacacacgcatgttcatgttaactgcagcactgttcacaataggaaagacatggaatcatcctaaatgcccatcaacagtagactgaataaagaaaatgtggtacgtatacatcatggaatactacatggccatataaaaaaggagatcatgtcctttgcagaaacatgggtaccctattaagtactatgcttcttaccttggtgtcaaaataatatgtacaccaaacccctgtgacataccctttacctgtataacaaacctggaccaggtgcagtggctcacacctataatcctagcactttgggaggcccagacaggctgattacttgagtccgggagtttgagaccagcccgggcaacatgacaaaaccccatctctacaaaataaataataaaataataaaataaaataaaataaaataaaataaaataaaataaaataaaataaaataaaataccagaattagctggggtggtggtgtgtgcctgtagtcccagctactggggaaggggaggttgccgtgaactgcgatcatgtcactgcactctaacctgggtaacacagtgagatcctttctcaaaaacaaaaacaaaaagaacaaaaaccaaaaaaacaaaaatccacaaaccaaacttcacatgtacctctgaacctaaaataaaagtaaaaataaagtaatataaaattttcatcaaagctgtgtaaacaaatcacacagtatgtaagcctttggatttagctttttttactgagcatatttttttttaatttcatccaagttgctgcattgctttttattgttgactagtactctaatgatgaatgtaccaaggtttgtttaaccacccaccctttaaaggacacctgtaaaatagttatgaagaaacctgccatgagcatttattgaattgtatttagagaacagcagggtagagtgatgtcttgtctcagaactgaactaaatcatttcttaatggacagataaaatttatgtatttattatgtacaacatgatgttttgaagtatatatacgttgtggaatgcttaaatctagctaacataagcattacctcacatagtcatgatttttgtgataagaacactttatatccactcttttagcatttttaatgaatacaatatattattatctatagtcactatgctgtacaatagatctcttgaacatattcctcctaagtgaaattttgtatcttttgcccaatatctcacaaattctgccatccttcaatgacccaagcccttgttaaccatgattctactctctgcatctttctagattccatatatgagtgagataatatggtatttatctttctgtacctggcttattttactcaacataatgtcctctagcttcatgcaagttttcacagatgacagtatttcattatttttatggataaacagtattccattatgtatatacaccacattttccttatccattcatccactgatggacacttaggttgattctacatcttgactatcatgaataatgctacaatgaacatgatagcacagatatatcttcaacatactgatttcacttcccctggatatatatcgagtaggagatggccagatcatatggtatttctatttttaattttttgaggaatcttcatattattttccataatggctgcactaatttacattcccaccaacagcttgcaaaattccattttctccatatcctcactaatactttttctctttttgataacagccatcctatcatgtgtgaagtgatacctcattatggttttaatttgcattttcctaatgatttgtgatgttgggcgttttttcatatacctattgtctatttgtatgtcttcttttgaaaagcatctattcaggtcctttgcccaatttttaccaggttatttgttttcttgctaatgagctgtttgagtatcatatattttggataaaacctttagccagatgtataatgtacagatattttctcccattctgtaggatgtctcttcactcttgttgattgtttcctttactgtgcagaagctttttagttttgtatagtcccctcatttatttttgcttttgttttctgtgcttttggagtcacatccaaaaagtcattacttagacctatgtcatggagattttcacctatgttttcttatagcagtttcatagttttgggtcttatatttaagtatttaatccattttaagttaattttcatatgatgtgagaaaattacctaaatttattcttctgcatggtagatatccagttttcccaacatcagttattgaaaagactgtgatttccccattgtatgttcttggtacctttgttgaatcagtttgctgtaaatgtatggatttatttcagggctctctattctgttccattggtacatttgttttcatgtcagtactatgctgttgtagtaactatagctttgttgtacattttaaagttaggtaacatgatgcagctttgttcttttcactccagattgtgttggctattcaaagtctgttgtagtttcatacaaattttaaaattgttttttctagttctgtgaagaatggcacttgcattttgatagggattgcattgaattgtagattgcttggtgtagtatggacattttaacaatatcaactttttcaatctgtgaacacaggatatcttttcatttatttctatcctttcaaattttttcaccagtatttcataattttcaatgtatagatcttctaactcctcgttaagtttattcacaaatgttttattttttgtagttatataaaggggatcactttcttgactttttcagattgttctctgatttttgtatgttgattgtgtgtaatgtaacattactgaatttggatattagttctagtagttttttagtgtttgttataaataacagcatgtcatctacaaacaaggacaatttatctcttcttttctaatttagattcatttgctttctcttgcctattgctttgactatgacctccagtatgtactgaatagaagaagtggcaagagtggccactcttgtcttcttctagatcttagagaaaaagcgtccaacttttccccagtgagtttgatgttagctacgggtttgtcatatatggcctttattatgttgatgtacatgctttttatacctaattgttgagagtttttatacctaattgttgagagtttttatcatgaaagtatgttgaatgttgtcaaatattttttatctgcatctattgaaatgatcatacgttttttgttctcccttcagttaatgtgatgtatcacatttattaatttacatatgttgaaccatccttgtatccctaagatgaatcccatttgataatgctgaagatctttttcacgtgcctttgaattctgtttgccaatattttgttgaagatgttttacatcagtgttcatcagggatattggcttgaggtttttctttttttttgtagtgtttttatctggctttggtatcagggtgatgctgatcttgtaaaatgaatttggaagtattccctcttcaattttttaaggttttaaataattgatatgagtcattctttaagtttttgatagaattcagcaatgaagccatcaggttctgggcttttttttttttgatgggagactttatattattgattcaatctccttactcattattggtctgtttatgtgtttattcattattggtctgctaagattttctattttttaatagtctggtcttggtaagttgtatacatcaaggaatttacccatttttttctgagtttttctatttgtttgcacgtaattgttcattgtaccctcacaatcttttgtgtttctgatgtatcagttgtaatgtctcctttttcatttatgattttatttatctgtgtctctttaagttttgtcaaatttgttaatcttttccagaaaccaactcttagttttgttgatcttttctagtgagtttctaatatctattttatttatttctgtgatgatcttttttttttccttccttctactaactttgagcttagtttgttcttatttttctagttccttaaggtacaaagttaggttgtttaccttagactggtcttttttgatgcaagcatttattgctatgaactttcctcttggaactgtttctgttgtatcccacaggtttgggtatgttgtatgttcatttttgtttgtctcaagaaatttttaaatttatctttgaatgttctgtaaatatctgttaagtccatttgttctagggtatagtttaaatccattgtttctttgttgactttctgtcttgatgacctctctaatgctgtcagtggagtattgaagtcccccactattaatgtgttgctgtctatctcatttcttaggtctagtagtaatcattttataaatttggaagctccagtgttaggtgtatatatatttaggattgtgatacttttctgttatacaaggcctcttatcattgtattatgtccctctttgtcttttttaactgctgttgctttaaagtttgttttgtctgatgtaagaatgactatctgctctcttttggtttccatttacatggaatgtctttttccacctctttatcttaagcttatgtgagttcttatgttttaggtgagtctcttgaaggcagcagatacttagttggtgaattattatccattctgccattctgtatctcttaagtggagtttttaagtcatttacattcaatgttggtattgagatgtgaggtgctattcattgtgctatttgttgcctaaatacctttttttaaaaaaaaaatttatggtgttgttgttttattggtcctgtgaaatttatgctttaaggatgttctgttttgatgaatttcaaggatttgtttcaagatttagagcaccttttagtagttcttacagtgctggcttggtagtggtatattctctcagcatttgtttgttgaaaaatattgtatctttcctttatttattaagcttagtttcactggatacaaaattattggctgataattgttttgtttaagtaggctgaagatagggccccaatctcttctagtgtggagggtttctgctgagaaaactgctgttaatctgataggttttcctttacaggttacatggcacttttgcctcacagcttttaagattcttccttcatcttaactgtagacaacctgatgacaatgtgtataggtgataatctttttatgatgaatttcccaggtgttctttgagcttcttgtatttgaatgtctagatctctatcaagactggggaagttttcctcgattattctcccatatatgttttccaaacctttagatttcttcaggaataccaattattcttaggtttggtcatttaacataatcccaaacttcttgcaggctttgttcatttttttaaattctttttttctttgtctttgttgaattggattatttcaaaaaccttgtctttgagctctgaagttctttcttctgcttgttcaattctattgctgagactttcagtgcattttgcttttctataaatgtgtccttgatttccagaaattgtgatatttttatttatgctatcaatttcactgaagatttttcccttataccgtctatcattttttttttttatttcatgaaattggacttcacctttctctgctgcctccttaattagcttaataattggccttctgaattctttttctggcatatcaagactttcttcatgctttggatccattactggtgagctagtgtgatattttgagggtgctaaacaaccttgttttgtcattaccagaagtgattttctggttcttttacatttgtgtaggctatgtcagagggaagatctggggctcaagggcttctgttcagactgttttgtcccatggggtgctcccttgatgtagtacttacctactagggggtgtctgcacagagttctgtgatgtgaaccatctttctgtctcttagtcatggatagcagcacctgctccagtggaggtggcaggggagtgaaatgcattctgtgagggcccgtagttgtattattgttgtttattgcactagttttgtgctgattggcctcttgccaggaggtggcactttcaagagagcatgagccgtggtagtatagggaagatcaggcagtggctggagccctagaactcccaagagaatctgatctttgtcttcagctaccagggtgggtagagaaataccatcaagttggggcagggttagacatgtctgagctgattctccttgggcagggcttgctgcagctgctgtgggggatgggtttgtggttcccgggtcaatggagttacgttaccagtaggattatggctgcctctgctgtgtcatgtaggttgccagggaagtgggggacagccgacagttacaggcctcacccggctcccatgcaatccaaaaggccagtctcactctcactgtgcctccccgcaatagcactgagtttgtttttaggcagtgggcaagcagggctaagaacttgccccaggctaccagcctcccagctgagaaagcaagcaggactttcaggtttcatacctccttgcctgcctgtgtctgcactctggattcactctctcccccaagttctgtccaagaaattttgcatgtttggttggaattgttacaaagttcagcttgaggtttctttttatctgtggtcttttcccagttccactggcaaccctccccaaggatccctgtgagacaaagtcagaaatggcttccctggggaccgagagagcccacagggctcttctggcacttcctctactcctgtatttcacttggctctctaaattgtctcagttctaggtagggtcaaatccttctcccataacctggaccttcgagttccccagtgagggtgtgtgttcaccctttcccactttcatactttgggcactcatagtatttgggctgtctcctgggtcctgcaggagcaatctgcttccttcaaagggtctgtggattcttttggctttcctggtatgttcctccagtagttctttcaggaaaagttcatgatgtatctccacatgctgctctgcctgtctgagtgggagctgcaatttagtcctgcctcccatctgccattttcccccataaatcctatgtgtcacattttctttatccagttcaccactgatgggcatctgggttgatgtcacgtctttgcttttgtgaatagctctgtgatatgcatatgagtgcatatgtctttttggtagaatgatttattttcctttgggcatatgtccagtaatgagattgctgggtcgaatggtagttcaactcttagttctttgagaattctgcaaactgcttttcacactgggtgaaataatttatacccccaccaacaggtaatcatcagagaaaggcaaatcaaaacacttttcaactttctatcaacattatactgtctatggcactagaaccaaactcttactgagtatccaagacttcattaaaattgtctctgctctgtctttcttaagttattctaatactcttctagacttgcctgtaactagttctcatttgactgcttttctagctgtcagagccatgggtacatatgtttttttacattcaggttatttcattagattcaaaaatcagatatgagttctagatgaagccattacattgtccttgagactgctgacccaacatctttgtgagatttttctgaagggaatcagaggagaccgcagttgtcatatgctatataaatcccctactaagaacatactttaaacttagtgactgttctttctttttctttttttttttttaatcttgggatttttaattacataaatttagtaaactcttcagatattatttttcatacttcacattacttttttttcttttttttatgatactttaagttctagggcacatgtgcacaacatgcaggtttgttatatatgtatacatgtgccatgttggtgtgctgcacccattaactcgtcatttacattaggtatatctcctaaggctatccctccccccgcccatcccatgacaggcccggtgtgtcatgttccccttcctgtgtccaagtgttctcattgttcaattcccacctatgagtgagaatatgcggtgtttggtttttttgtccctgcgatagtttgctgaaaatgatggtttccagcttcatccctgtccctacaaagaacatgaactcatccttttttatggctgcatagtattccatggtgtatatgtgccacattttcttaatccagtctatcattgatggacatttggattggttccaagtctttgctattgtgaatagtgccgcaataaacatacgtgtgcatgtgtctttatagcagcatgatttataatcctttgggtacatacccagtaatgggatggctgggtcaaatggtatttctagttctagatccttgaggaatcgccacactgacttccacaatggttgaactagtttacagtcccaccaacagtgtaaaggtgttcctatttctccacatcctctccatcacctgttgtttcctgactttttaatgattgcctttctaactggtgtgagatggtatctcattgtggttttgatttgcatttctctgatgaccagtgatgatgagcattttttcctgtgtctgtgggctgcataaatgtgttcttttgagatgtatctgttcatatccttcacccagtttttgatgggcttggtttttttttgtaaatttgtttgagttctttgtagattctggatattagccctttgtcagatgagtagattgcaaaaattttctcctattctgtaggttgcctgttcactctgatggtagtttcttttgctgtgcagaagccctttagtttaattagatcccatttgtcaattttggcttttgttgccattgcttttggtgttttagacatgaagtccttgcccatgcctatgtcctgaatggtattgcctaggttttcttctagggtttttatggttttaggtctaacatttaacctttaatccatcttgatttaatttttgtataaggtataaggaagggatccagtttgagctttctacatatggctatccagttttcccagcaccatttattaaatagggaatcctttccccatttcttgtttttgtcaggtttgtcaaagatcagatggttgtagatgtgtggttattatttctgagggctctgttctgttccattggtctgtatctctgttttggtaccagtaccatgctgttttggttactatagccttgtagtatagtttgaagtcaggtagcatgatgcctccagctttgttcttttggcttaggattgtcttggcaatgcaggctcttttttggttcatatgaactttaaagtattttttccaattctgtgaagaaagtcattggtagcttgatggagatggcattaaatctataaattaccttgggcagtatggccattttcatgatattgatttttcctatccatgagcatggaatgttcttccatttgtttgtatccacttttttttcgttgagcagtggtttgtagttctccttgaagagttccttcacatcccttgtaagttggattcctaggtattttattctctttgaagcagttgtgaatgggagtccattcatgatttggctctctgtttgtctgttattggtatatgagaatgcttgtgatttttgcacattgattttgtatcctgagactttgctgaggttgcttatcagcttaaggagattttgggctgagacaatggggttttctaaatacacaatcatgtcatctacaaacagggacaatttgacttcctcttttcctaattgaataccctttatttctttctcctgcctgattaccctggccataacttccaacactatgttgaaaaggagtggtgagagagggcatccctgtcttgtgccagttttcaaagggaatgcttccagtttttgcccattcagtatgatattggctgtgggtttgtcataaatagctcttattattttgagatacgtcccatcaatacctaatttattgagagtttttagcatgaagggctgttgaattttttcaaaggcattttctgtgtctattgagataatcatgtggtttttgttgttgattctgtttatatgcgggattatgtttattgatttgcgttcaattttttaaactcaggcaactaattatcctgtttctaatgttagtttattgaagaattggctgatttttataaatagtatccataaaatgtgtaacgggtggatttcgtgttgtttaaggcacaaatgaacttaatggacaaaccttatgaagattgtgatgatacgaaaagcataactggaaattaggagatgtgtttttaattctcactaatactcagatgggtttatgccttattgtttaatatgtagtgcctcaatttccatattcatagaattaggaatttgctacagttattcaccaaaatttcttccttatatattctctaattatttatttcagatattgaaaattaggttagaatgtatttttctgcttatctatttatttttatagttaaaaggtactctaataagtttgtggtttcatttatttgtataaatagaagcgatgctatactcacagtgtttaagaattcacagtgtttaagaattcagagatcttctttatatgattaataacattttattttcaattgggttatttattttaaagaaggatgagtgcttttagcttatgaatactaagactaacatgagagcatataataaccacttattttgcttaccattgttttaataaacatgtaaaaattattcaaaatgactatgatttttttttttgctctcacagcagcatgtattaaaagatgcttttaaaaatagggctctgctacagggaagctaaatttattctattaggtagactaaaacaggcctaagcggaaacgacaaacgttatttgggaaatgctaattgtttgaaaagcactttttgatgaagatgaaagaagagttaagttctatgtttgtaaagttaggagtttttatggtttatagaagagcagaccacaaatgagctataaatgtaaggtagtcttattttgcttctcatgaaaagaaaattaaatgatttcggaatttctgctgtgccatctaaaatttggttacattcagcttgtaacattgagacaatcggtcaacaaacatttataggcatacctcagagatattacaggttagtgtcagacatgcacattaaggtgagtccctgtctccactaaaaataccaaaattagtcgggcatggtggcgtgtgcctgtaattctaggtactcaggaggctgaggcaggagaatggcttgaacccaggagatggagttgcaatgagcccagattgcaccactgcactccagcctgggttatggtgtgagactctgtctcaaaaaataaaaaaaaagttatctttacagtatactctagtctattaagtgtgccatggcaatatatctaaaaaaacacgtatcttaattttgaaataataattgttaaaaagtgctaattatctgagtcttcactgagtcataatctttttgttggtagagggtcttgcctctgtgttgatggctgctaataattagggtgacagttgctgaaggttggggaggctgtggcaattttaaaaaataagacaacattgagtttgccatataaatggactctttcgtgaaagatttatctgcagcatatgatactgtttggtaacattttacctactgtagaacttactttgaaattggaatgaatctcaaactgtattgctgctttatcaactgtgtttatgtaatatttgaaatcctttgttgtcatttcaacaatgttcaccaaatcgtcagcaggagtagattctgtctcaagaaaccactttttttgctcattcataggaagcagttactcatctgttcaagttttatcatgagattgtagcaattcagtcacatcttcaggctccaattctaatctagttctcttggtatttctatcacttctacagttacttcctccactgaagattaaacacctcaaagtcatccatgagagtggaatcaacttcttccaaactcttgttaatatttatattttgacctcttttaatgaatcttgaatgttctcaatggcatctagaatggtgaagcctttccaggaagttttcaatgtattttctccagacctgtcagaggaatcagtatggcagctacagcattaagaaatgtattacttttcttttctttcttatttttttatttttattattttatgtgtgtgtgtgtgagacagagtttcactcctgtcacccgggctgggagtgcaatggtacaatcttggcttgctgcaacctcctttcccgggttcaagcaattttcctgcctcagccttccaagtagctgggactacaggcgcgcatgaccacactcagctaatttttgtatttttagtagagatggggtttcaccatgttggccaggctggtctcaaactcctgacctcaggtcatccacccgccttagcctcccaaagtgctgggactacaggcatgagccaccactcctggcaagaagtgcatttcttaagtaataagacatgaaattcaatattactccttgatatttggcctacagattggatgttgtatattcaggcatgaaaacaacattgatctctctatatatctccactggagctttggggtgactaagtaccttgtcaaagaccagtaatattttaaagggaatctttttttatgagaagttcatcccaatgatatgtttaaaatattcagtaaaccatgttgtaaaccaacatacatgaaactacaaagcctgagtgagaacctgggtaacaggctttgtacttccatttatgcaacacaggccaactagatttagcataattctaaagggccctaggtttttcagaatgttcaatgagcattggattcgatttaaagtcacctgcttcattaggccctaataagagagtcagattctcctttgaagcttgaagccaggcattgacttctttctagcaatggaagtcttagatggccccttcttccaatagaaggctgtttcttctccatttaaaatctattgattgttgtagacaccttcattcattatcttatctagattgcctggataacttgctttagctcccatatgagtacttgctacatcaccttgcccttttatgttatagaggttgctttgttccttaaatctcatgaacaaacctctgctgtcttcgagcttttcttatgcagcttcttcacctctgccagctttcatagacttaaaagaattaggaccttgctttggattaggctttggtttaagggaatgttgtggatggtttgttcttctatccagaccactaaaactttctccatatcagcaataaggctgttttactttcttattatttatgtgttccctggagtagaactttttattttcttcaataacttttctttgcatttacaacttggttaactatttggtggaagaggcctaatttttatctgtctcagcttttgatataccttcctcactaaatattatcatttctagcttgtgatttaaagttagatatgtctttcacttgaacaattagaagccattgtagtgttggtagttggcctaatttcaatattactgtttcttagggaatatcaaggcccaaagagaggtatagagatgggggaacagggggttcattgagcagtcagaacacacaacatttatcagttatctgtgttgacttatataggtgtagttctgttgcactccaaaacaattacaatagtaacaaaacagatcacggaccacagatcaccaaaacagatataataataatgaaaaagcttgaaatataagaattaccaaaatgtgacacagagacatgaagtgggtacatgctgtttgaaaaatggtgctgagagacttgctcggcattcaacttgcaaaaaaacatgctatcagtgaagtacaataaaaaaaagcaccgtaatgtgaggtgtacctgtattgcccttttatttgtatagagtaaacagttttatgtttgaaggtagatgtattagacctcaggtatagtgatcacgtctcaattctgtcttcatcacaggcatgaacttattcatttcctgagactcctgagagttcttctcactctttatcaggtcttcacaaatttgtacgttaagctttcctcctgagatgaagttttgcatctgctaccagctggataagcaattactgggcattccatgaaaaatagaactttttcatatcctttaagagattgttaagaagtaattggccttggaaagctaataccattctgctacccttttgggcatatcttcccaaagggcagaattttattcattttctgagaatttctaatgactctgaacattaggagatggtctctttcacaatgtttttattttttattttttatttttttctaaaaattgaaaacctaaggctgaaataactttcaagatgatagctgtggttcttgtccaggtaagcattttctcaaagccttcctcagaacactggttctgcaggcttttaagtagctactatatatgcataaaaaggcttcctggtcaaataagtttagggaatgttaggataattgtttttttttctatttttttaagacctcttggagactttaatgtgctaatatacttcatgactgacagagaagtgggtattaggtatactttttaataagttgttttaactacgaattcctttttatttgaagaatatttatggaaccaatattccttaaacctactttgagaaatgttggcttccattgaattttccatctaagttgaattacatatttattaactcgtttgatctttactataattctgtgaattaggtactctttgaatgaccattttatagaagaggaaactatgattaacaataagttgcttatttaagttcattcagctagtggagacatagctaaaattcaaaagcatatatatctgatgccaatgttcgtgctttcaggaataccgataaatggaaatcaggcagaagttgatgactgattggatatgggagaccaggagatggtggagctcatgatcaatcttaagtagacgagaatgcagaagaaagagattttaggaaaaagaagaaagccttaagaagaagatcacatttaagctagatggatctagactattctggacaagggacatgaagataggaaataccaggggtagagaatggattgcacaaaggcaaaaagagggagtcttggaattttcatgaaaaacagagggactaagaagagaaatcatagaagtcctatttaaaaagaaaattttggagtttggatttcaacttggaacatggcttttatccgataactattatcagtcactactctaaggaaataacctgatgccagctggacattaggaagattaactgtatcaatgtctataaaaagatggccctcagagaaaaccatcatttaacagtgctctttggccatttgaattattagtgaataggcatgtatttaatttataacttactgaaaaaaatttaaaaatactaatttgttctaaccacaacttttttttttcatatgggataagcacgttttctttttaccaaatatcctgatttattctgtaatatttccttaatatttatctgatctcattttaaggaatttagggaccttttaagggagatatatcatttcaaaatttacttagtaaccttttctataacattgattaacagagtattaaataaatatcttatttaagttaattagtttttactaattccttaaatgccacaattttgcataggtgaatgagttagtggacaaatttagaagacactggggctgagctttatttcagttgacaaattatggacactcctggtgcgatctagaagaaaggcaagtaaaaattccttttcctagaataccaactactttttcccttctcataaaaactttataaaactagttggacaatgatgacatgttctgcctgcatcagagcaaagcctacttgtcaggtctattgcctgccatggacttattaaatgtcactattccagtgttgaggctgattccagtcagcatgttactgcactgaaatctttcctcatatgtgaatcgaaagttcctattatatagagattcttagtttatagaaagtttttaaagatcaaaagaatttttttatgtgaaaatactttgaaaacttcaaaatactatagaattgttggttattatttatgggagccatagtcattttgtataaagaataccagtcacaaaaagtcacatgaaaagaacagaaaacaaaattcaactttgtccttttttcctgttagagaatttttgacatattttgaagtgtaaatttagtcctaattggatttgcatacatttaaacagaaccaaacttctaatattttgttttctctaacttttgtgtctttctttttcttttattttgtatttttagtgggaggagtagaatcctttacctctacttagaaaaataccatttcatacctactttacgtaagataatggccatgaaaaagtctggtactattactggcacacagagtagattctcagtaaatgtgggttaaatgtgaaaaatttccttgtagggttatgacaacaaggttgtcacccttgcttcaaatggatgaggccaggatgggaagagaaaaataggtcttttttaagttctttttttttcctctttaagtttaataattgtccgatagctaatatctaatgtaaaatactactaaaattagagaactgaattaaagaccaaattaaaaatggtgatttttattaatgtgcctttatacagccttcaagtagactttagcacatatctttaaagcacataaaagatagctgctttttgtaactggagcccctcatccttctagagtacacctctgcagcatgacagccatctgctgctgctcccttagtggctgcccctaaactgcccagactctctaaatgttgagtggaagaagagaaaggaacagctgttcgggagctttgtggctgcctctgccctcctcaccacctggcaaatgcacagctcagctcatggagctagcagacacactaagtcaaactgtattcttctccacaccacttgctccttcctcacataaactactaatctcctttctgccatcttttatccttctcttttctgttatttccattcgatctttaggatgctaagtggaaatgggatagggagactgaacagctgtatccagagaggacaaattgtatcctgttttccatcttactatttttattactttaaccaaaaattctttaaaaaacctacatgtcagaaatatatgtaaatacataatttcatagagtttccaatcaacccattatgatgggtattgctttttatatgtaacaggaaaaatatggatataagactagtaagagtttctcactttagtcttctctttaaaaagaaacatctttgctgcccataatcagactgatgaatgagagggagagtcaggaatcattgaaatcagtttgattgatttacactaaaaacataagagaaggaaatgaatagattaggagatgaaaaggagggaatagagaaagaagcatgggttgggtttggtgggagattttaagagttatgaaagaagaaagagagtctttggggcagctgcaaaatgagaaagatacacattaaaagaggcgaggagagagagagaaaaaaaatgctttgaattgagaggccttccacggagaaagcatgctcaagagggtacaaaaaggcttttaagaaattgcattgggttacatagagatttatcttttggcattgctgagaaatttcaattaatacttaagttgctttcgaattagtttttgatgtttagacattatgttatagttccatgaggcagctgagttttctgtggttacagtactggaatgtaaaatgtcacatctactttttttttttggagtaaatcatcatctaggacatatattagagtagaacttcatagtgttttacactttggaaatttcacagaaatttgtatttcgttgtccttgaaatattatactaaagttagagggaaattttgttactactctgagattaagagtagccctttggggtgataatctactatttggtattggattactaaatggattatttttaaagttagtgttaaatgattacactaaatcaagacttctaggaagttcctttaggtaactgcagattggaaattggcttttcaactttatctcccaagatgtcagctatgttaagaaacgagataccattcaggatggaggaaggagatgtggcacccatgcctagattgggtgataacctaaacctctgctctcctgactgtggttttatcctatggttagacttagaaaccaccagtactcctaagaatttaaggaattgatggccaagtttggaaaaataggactgtgagttatggataaaatttcccactgaaacaggacagctacgataagctttggagccattgggttggtagtgaaatgaatgattacatggtttggctttaggatgttttcctggagtcaaaagcttgcacaacctgtgcttttgaagaagacaagaagaccacctcactgacctagaaaggatacaacagagtcaatgggggctgtaagtgtaagtctggtttataattagactttgatagtgaagagagaaatacccacctttgcagtcagactggagctcattgacattttgaggaataaaactcaggagctcaggatcctcactgacattttaaggaatagaaaatgaaaataccaaaaaggtgggaagagagaaaaagagatgagagtcagtcagtgtgggctgatagaggatttctgtagaggtttaacagaagaaagagatttaaggatagttgcaagtattagagatattaaaagctgggggccgggtgtggtggtttatgcctctaatccaagcactttgggaggccgagatggatgaatcgcttcacctcaggagtttgagatcagactgggcaacatggtgaaaccctgtctctacaaaaaatacaaaaattatctgggcatggtggcttgtgcatgtagttccagttacttgggggactgaggtgggaggatcacttgaggccaggaggtggaggttgcagtgggtggagatcacatcgctgcactccaacctgggtgacagagtgagaccctgcctcaaaaaacaaaacaaaaaaccaaaacagaacaatacaaaaagttggggaaaatgactttttgtttgctctgtgctgtgaattgagtcttcttttgccatttgtgagtgacatcaagaaatattttaatcacttctcaaaatgttggtgagaatttagtttttaaatattacataatgctgggccctgtctacatggggcattgactttgcagatgttaaacatatttacagatgaggaaaccaaagctcagagactagaaagggcttactcatgactctccagctatagcatttgaccaatactaaagctgtttgcattacacagtggttgcctccatcagcctccatcatgtttcttgttagtaaccattctgggagaagagtggatgagagctaataattgggtgatgagagaaatatatttgggttcaagaccaaaaattgcacttggaagttaagttctcaaaataagagagacacaaatataagaaagaaagcaaaactcattatactgccttaggaaatacaatttttttttaggggttggcatctcacaaatgcgagagtatcacaggcttacaatttcaaaaaacagtgtgtatgtaaacaaggataatgtttctgagttccacattgacatctgattattcaattatgttggtttggttaaattttttttcttaccttaagttcaaagatacaactcatgagtcaagtagcagattttattttattccctatagcagcggtccccaacatttttgggaccagggactggtttcatagaagacagtttttccatggacttggggtgagagggatggtttcaggatgatttaagtgcattacatttattatgtgctttatttctattattattataatacattgtaatatataatgaaataattatacaactcaccataatgtagaatcagtgggagccctgagcttattttcctgcaactacagagttccatctgggggtgatgggagacagtgacatatcatcaggcattagattctcataacaagtatgcatcctagatcccttgcatgctcagttcacaatagggctcacactcctatgagaatctgatgcctgtgccgatctgacaggaggcagaactcaggcagtaatgcttgtgctgctcacctcctgctacgcagcccagttcctaacaggccacaaaccggtaccagtctatggcctgggggctgggaacccctgccctagaggatctgttgtctacccttatagtatatggttgctcaaagttaactgagggaaaaggaatcaccagagaattcgagccagttctgagacagagcttggaattcaatagggctgacagaagactgtgagtcatgttatactacccttgcctaatagagtcagtattcatcagggaacctcttcacaggaagtgctgagtccacaccttaacagtcaggtcgatcaatggtatcagatagtagatgtagtcttggggccagtctgcaaaacagtctaaaaaaaattaaaaggagcctgtttctaaaaaaaatagtacagtgtattctgtgagtgtctaattaaaaagaaaatgaaaaagaagtggaatgttagttgccttgggggatttcagatcacaaagcactcaaagacttaactctgtagaaaaaaagcaaagtgaagagagagttggaaaacacatctgaagattcaggtagtaagatttcaaacctcagtcctgaagatgtagcttcatcactgaccgtataataggtgggaaaatccctaactccttagagatgacacatccagcattggaatgtgttatgatgaatacatggttttccaaattcatcacattcttttttaatatccctttagtctctgtttacagacttactggactgcttgccaagcctgcagtcagtcatgctggaactctctaaggttatctaagagctgtattatattccagccaaaatcagtggagttgcttatctcccacattgatgaggagttcaatgttctgccagtaactatagtaatggttttgatgtaatggtatatttattaaaccaatagctatggttcagtgttggaacattgaacaagcctcattggctgaagccagaaatgtgcatttcttctccagggtaggtgggtgatggtaacagtgtcatttaaaatggtgttttaagttttacttcttaatttcttttgaagtttttattttagaagattgctttaagtcaaaagcaagaatatctgatttcacttctccagacctttggacctccttagagaggcaacctttttgaattgtttgcagtatttttgttaataactacaagtattatacctcaacttcttcatctattaggttattttctgagaatgtgataagaaaggttggaatttgaggatgggcatggtggctcatgcctgtaatcccagcactttgggaagccaaggtggatggatcacctgactctcaggagtttgagaccagcctgagcaacatggtgaaaccctgtctctactaaaaattcaaaaattagccaggcatggtggcacactccctgtagtccaagctacttgagaggctgaggaaggagaatcacttgaacccgggaggcggacgttgcaatgagccgagataatgccactgaattctagtctcagtgatagagtgagactctgtctcaaaaaaaaaaaattaaaaaataaataaaatgaaataaaggtaagaatttgtttacttttgctgtcttttataccctcttccctccccaaagcttgctttgtatatttttgagattctgatttttcttctagtaaattttgtggccccagaaaagtatacttaatcctctatttttggttacagctttttgacatatatcttgactccctgtttcattaaaaaatgctaaaatatatatactttgctctactatttcttctcacatatacaacttattttttgtttgtttgttttgagccacacttttacatcatcccattgtgaacactggcattctatcctgtgagaataataaaattttctttttctttgttcctgggttgactctaataggagaaaacaaacatttacattatgatgactgtgtaaacattatttaagttctggactaagattccatttcccacttcaaaatatctgacaccataaacctggggccatttaaaagaggatgttgctggcatcaaggtcacctgaattgtcttctcttatattcagtctatcgcttaacgttctaatgcatttttacttgctttatatttagatttaaaaaattttaatgttgtttccaatcatcattcttttagtttttcttgcaccgtttgtggttatgcattctctctgtgtctttctctgtcttcattatctttgtgggtcttcattcaacccccttaggatgtcacttctgtacctctgtgtctccttgttttcagctttgctggttgctttttagtttaccatgaaactaccctctttctctcctttctctaccattctgggatggaatatcatttcatggattccaggttttcctccttcttagtttacttctgcatgtttggagtgcatcctaaaagaaattcccaggataggtgcaaaggaaggaagttacctcagaaaatgtcttatagatagctttattctggcttacatttcaattgatagttttgttggatttggaaacaataatagaaaattttccatcagaactttaaaggtattactttgttatttttagtacctagtattgtcaataataagtcaaatacctttgtaggaaactaggggtaacttggcatcctccagcattccctgtgcagagcagccatcggatgttgtcatgtagacattcatgtctatctatcagcattggaatatttctttgtattattttatagatattataccatacaaatcttctctggtctttattttttggaattctcttaaccaaataatactctgtgggatgatcctttatcttgctaacactgtctctcatatttatctttttgctttatgcattctacatgttctcaattttatcctttatgtttgtatgtatggttgtattttcctctctagtctctatattacttataacttttaaaagttcattttccttctttggaataattcagtgtcttccaagaccagagagtttcgttttatcttctgtcctctcctgctatgtggtggtacatggtttaagacattcctggggccaggtgtggtggcttatgcctgtaatcccagcactttgggaggtcgaggcaggaggatcacgaggtcaggagttcgagaccagcctggcccaacatggtgaaaccccatctgtactaaagatagaaaaaattaaccaggcatggtggcatgcatctgtaatcccagctactcgggaggctgaggcaggagtatcacttttacccaggaggcagaggttgcagtgagccgagatcatgccattgcattccagcctgggtgacagggtgagactccatctcaaaaaaaaaaaaaaaatcctgtatatttggaattggtctcctctgctgctatgaaaaacgattgacttgtttttgccctagatttctgatctgaaggggaaggcagcccagggattcagactctatgcagatcaaaggagagtgggaaatacttgttggcaggcaaagaggatatttgttcctatgggaagggccagcacacacactagaaatcttactattcccagaattttgttcattttcttaaagaagagccctctggtttcttgcccaggggtaaatgccagttgagtgggatgggtctcccatccttgtcctgtatatagatcatcaatggctctgtagttagactctttattttcagtacagtatttaatctcatttaaatctcataaaatctaaattacttcctatctctgtgtgctgtgtctccatggggttccctttgggaaaatagattgtaattgaagctgtcttgcagtatatttcagtttgtgaattttctacttatttttatctatcaacctatggacttctactttatatttctgatatttattaaaaatttcttgtattagtaatgatttcctttacattttgtataattacatgatctctaatgactttattctctcttgcatacttagactgagaagggctctggagcgatgaacagcaagtcatgagccaggtcctaggccagctgtgtcagtgtggtttgaaagtgacctcatgcaatgttgcctcatttatgaagagggtagttgcctgttggttatgcagacaattagatttagaaaaaaagtgacaaacatcacagaaatggtatttgaatatcatcacaactcattctgctgacattctgaatatatgttctgaaaagccaaggtttggggatctcaactttttggggtatttatgaaagaagatgtgaatcaactagacacctattttcagaaagagtcttggattgtgttgttgctctttcccaagtctggttttcctgagctggagtagccaggggaagtgtcatggtaattcctatgggtaggggtaatggggggaatgccagagaatgctcctgaaatttttagtagttttataatttagtgtcagtggcatacaggtaaaggaagatgtttttcaataagtcttcaaccttccaataaatgggtgatgggactagtgcaaaattattcattgttaccacttataaaaacttctttagagacttcttgtcagtgggtggattgctgtctaggagtacaggagatattttgaatttctaatgtctagtttattttatattcatacaatgaagtaggctattgcagctggagtggcttaatgctttgagccctaaagttataatttaagaagtatcctacctgacagatgtctaggacccatatcccacttcatgctcacttatgcaaggatttttcatccaacactgttctacactgtctcccagtggggaagtacaggtgaactgaaattacaaatgaaattacagaaggccagaacatatgaatatgtaatatagagagtgggcatagggcaaagtattgattgaaaataaacaagatgagaaggaagtagctagggaaaagaaaaaggcaatagacaacaaaagaaaatatcaagttagtttaagaatcaaggaaattagaaaacttgatgtaatctggagccagggaagagttacagtgaaaatcagaatgttctggtcatgaaatccatgtggataaataatagactcaattcaggtgactatggagaaagaaaattacatcttatggggataagttgttcttcaagccctcgttgataactccaagcatttttaaggactggaatttaaaaaggatgatgtctaagaatgatattgtttagatgtgaaaaactggcagacctaggattgacttaggtgcctgtaatttgcctttctgtattcagcttagagttctaacaccttgcagctgataatagagtagattttctttctaaatggatgagactgcatttttggataatttatattgctggcaggatgtgggaaaagacacgctttaccacacattactgagagaaaccacttggccccttctattgtcacagcaaaactgatgaacagttcctacagaacgcttcctccctgagttctccatgtggtttcattccaattttagtgactctgtgctaacactgctagagaattactggtgtgtcagtatttgactggcagctctgatgtggacacaaagtgtcgttttcttcctgtagtagaatataattaaaaataaaattcactttcagcatttttgtttctttttgaagaagttcagtatgtcttgggggaacaaacatgtggatacatggagcctgtcatggtcattaaatacccaggttggaaagtacctctgtgcaaacaatagttatgtggcacttttgccagcttcattttaaggaacaaattagagaaacattggcttgtgactacattatgtaaaatacaaaacaaaactagagtaagaaactacccagtctttagatggcccactgatttgagaggagaaacaaaatttttcttgttagatagttgtggatcttttgtgtgttcattggagcagctaaactttggggcataaatggaaagaaaacaatttgaagaagtataatagagtggaattttgaaaagtcttcagagtatggggctgaatcactgctgtttagcaggtgattgacaaaggcattgttcttctctggtttatttattcaggattatgtatcctgattgttttttctttttgattttccttgcagtagtatcaaccttgatagtgattttatagttgctcagtacgtttcatcttggctagatcccaaatccctttgaaatgatttccaacttattaaagagctacaaacaattgtcacaatgctgaagtcaccaaataggctctagcagcaccctttgttttgatttaattttaagattatcaaaatcttatggaagaatcattccctttattttgtagcttgatcaatatttttaaactttaatgtggtcatttataatgaaaatgaaggacaacataaatttttgtagtactttttatcagtttaatgatctgcatataaatttaggaataatcatttacttcaaagtcagtcatttaaaaaatcttctcaactcccaattatatgaagtttaaataatagtctgcagaggtgagagacagagggagagagagggaggagctctgcagttttcttggagaaatgtaacctagaaacccagatgttttgtatgctaatcaggtaaccctaaataacttagttttaaagacttacatcagttccgaattacctgtgttaatagagttttaaaatatgaaagtaatggcttatgtggaaatattttagttttggaatatatatttttctttctgttaacgtaactatggatatgtttgatatcttgaatgttcactttaaacagaatattgaattcatgttgggaaggtctaagtaaagaggaggcacatacacactcctgaagcttccttccttctttgcctcattatctctgttctgtttttctttccaactttgagcccctcactaaaactaatataaaacagtaggcaaatgtcttttctttttataattttaactagtttaccaaataattttaatttgttggagatataaacaagatattatttcttccttttctgtcctgtagaagagttgagtgcagattccatagctttctgataatttttggctattaaaattaattcaccatcatttaggacagcaatcctcatatcctctctgaagcttaccccttacatcctccactgtaaactagagatgttattttgtccaatcaaagtatgaatgaggactcatgggcaaggatgatggtgggtccagggttgatagtctctttctggatataacatcttatttttgtctctttatagctgggtgggagcaatgaggatttatacatgagaccaagttcttacctaaccggaggcttatcagtaatggggaaatatctttttattttattttattttttgcaccagagagctaatttatttaccactaaaagcatacacaattaaaaaactgttgtattataattaaaaacacttaacatgaaatctaccctcttaacaaattttttattatttaagttttagggtacatgtgcacaacgtgcaggtttgttacatatgtatgcatgtgccatgtttgtgtgctgcacccattaacttatcatttacattaggtatatctcctaatgctatccctcccccctccccctaccccacaacagtccccggtgtgtgatgttccccttcctgtgtccatgtgttctcattgttcaattcccacctatgagtgagaaaatgcggtgtttggtttttttgtccttgtgatagtttgctgagaatgatggtttccagcttcatctatgtccctacaaaggacatgaactcatcattttttatccccttaacaaatttttaagtgcacaatacattattgttgactatagctacaatgttgtccagtaggtctctagagcttattcatcttgctcaattgaaactttaaaatgttgatgagtaatttctcatttattcctgcccccattccctggcaacatccatcccactctcattctatgaatttgattattatatgattcgactcatataagtggtaaccaccattctaaacttaacttctatgagaccaacttctttagattccacataggagtgagatcatgcagtatttgtctttctgttactggcttatttcctttagctaatatccttaaggtttgtttatgttgtcacatattgcggaatttcctctttaaaaaagataaataatatttcatggtatttatgcatctcattttcttttccgttcatctgccaataaacatttagattgtttccacatcttgactcttgtgaacagtactgtggtgaagataggaatactaatatctctttgagaccctgatttcaattcttttggataaatactcagaagggagactgctgggtcatggggtagttctatttttaccttttgaggaacctccatgctgtattccatagcgactacaccattcctcatttccaccaacagtgtgcaagggttccagtttctccatatgcttgccaacattggttgtttttttgataatagtcattctgacaggtgtgaggtgatacctcattgtgattttgatttgcattttcctgattatgcaaatcatcaggaaataatgttgagcatttgttctcatagctattgtccatttgtagatcttctttggataaatgtgtattcaactattctgcctatattttaagttgggttagtttttttgctattgagttgtagaagtttcttaccaattttgaaaactaactcattctcagatatatcactttcaagtatgttttctgatttcatagattgtcattttactgctttctttgctctgcagaagatttttggttgatgtagtgcctcttgtttatttttgttttcttcgccaatgctttggatgtcaaattcatcaaatcattgcctagatgaatgtcatggagattttctcctatttttttctagcaatattataatttcaggtcttacatttagttctttaatccattttgacttgatttttgcatatggcaataataaaagtgccagttttattcctgtgcatgtggatatctagttttcccaacactatttgttgaaaagactgtcctttccccattgtatattcttggcatcctcactgaagatcatttgaccaaatattcacagatttatttctggggtctctattctgttctattggcttatatgtctgtatttataccagtaccttatcattttgatttttgtagctttgtaatatattttgaaatcaggaagggagatgcctcctgctgtgttcttcttgctcaaaattgctttgctatttgggttcttttatagtttaatataaattttaggattttttctacttctatgaaatttctttgggattttgatagggattgcatagaatctgtagatcactttgagtagtctggcattttcacaatattaagccttctaatccataaatacaggatgtctttccatttgtttgtgtctttaatttctttcatcaatattctttaattttcagtatataagtctttcatctccttaggcttatttctaggtatttttattatttgtgatgctattgtaagtgagactgttttcccaattttttcagatagtttgtcattaatacatagcaatacaattgatttttatgttgattttgtatcatttaactctattgaatttgtttgttctaacagtgttttgttttgtttttttaataattgagtctttagagttttctatacataaaatgatgtcatctgcaaacagggacaattttgcttctttccaatttggataccttttactttcttttcttgtctaattgccctggctgggacttccattaccacgttgaatagaagtgctaagagtaggcatccttgcctttgtcccgatctttcaacttttcaccactgagtgtgatgttacctgtaggcttttcatatgtggtctttattatgttgaggtattttccttctagtcctagtttcttgtcagtttttatatggaattgtggttgaatttcatcaaatgcctttctgcttctatttggatgattatggaatttttatcctttattaatgattaattgattttcatatgttgccatccttgcaactcagggataaatcccaattggccatggtgtatgatccttttaatgtgctattggatttgatttgcttgtattttgttgagaattttgcttctatactcatcaggaatattggcttttagctttcttttcctttgttgtatttggctttggtatgagggtaatgctggcctcaaaaaattagtttggaagtgttctctcctcttcagtttttttggaatagtttgagaagggttggcattaaatctttaaatatttggtgtaattcagcagttaagccatctggtcctgcacttttctttgtagggacattttttattactggtttaatctccacactaattaaaggtatgttcagacttcatatttcttaatgattcagtcttggtaagttttttctagtgttttttttccatttcttttagattatctggtttatctgaatataattgcttttagcaatctcttataatttattttatttcattggcatcagttgcaatggggaaatatctttgacttcactctggttcagtctggttccatatgctggtaaccatggctgacaggtggtttccaaatcagtagtgtgctttgcttccttgagttgagttcagcttcaactagcatcttctttgatgaggagcccttcagaaaacagcaggcctatcatctcttggcccttgctattgatcaaaacccccaattaaaacacttttgctaggaaagatgtctcattgcccagtggctgctagaaaagactagggcacctgcccatcatctgactttcatttctttttcacatggaggtgggaccacccaaactgctaatttctcttcctcatctccaaagggttctggtagccatctactagacctaaatataaccataaccatcaccctaactttttgccttggacctgatgaaactctattataatttttataccactggtttagagttctccagaaattctgcagcctttagaaatttctagcgataagcactttctctgttaatgtacactttcacacatgtgagaaatcaataaatttcatgcatcaggaagttctaaaataaactatcttaccatccttctctgttgtggtagccccaagtatacctgtaggttttgttggtcagcaaatatccacctaggatatctttttatgcagctaccagcagtctccacaagtggttcagttggagaactgtccttttgagggaaagagccaaagccactcccctaaacatggctctttcccagaggctgacaagccacagcttgatgcccttgagcccttccctctcagttttctccctaaaaaatgagatttaagaggaagagtggatgggaacttgctcaagtagggctgcctctggcatgtcttggttggccttcaggatggctctctgactcctcttagaatgtaaagtaaaggtagtttttgggaagctcttcccagacctttcagctttaggatttacctggatttccaggtaaaggaaaaatcctactcaacattctgttacactacaatttcttagtatttgcactgttgacatgagaaataatgaatatttttgattaaatatgttttttttttaaaaaaaaaccacagggcaagtagaagttttgatattataaaagagaacttaagaagaatgtttcaaaatatcaagaatttaaaattactgttgatgccgtaaatcaccgaggggtagaatgttatgcctgtgtattatacaaggccagatgcctaagtgcagtgtaacatgaggaagcacacgtaagtgctaaggggcatgcgattactacgttcattataacaggcttctaagctttcaaacatcatatccacatattgtacaatgggcagtacggaaacagcttggatacatttgttataataattagttaaccatatatttctttagtaaatctttgggtcatctttttgacatttagagcttgtttatttaaaacctttgcttatttatttatttgagatggagttttgctcttgttgcccaggctggagtgcagtggtatggtctcggctcaccgcaatatctgcctcctgggttcaagcggttctcctgcctcagcctcccaagtagctgggattacaggcatatgccaccacaccggctaacttttttgtatgtttcagtagcaacagggtttctccatgttggtcaggctggtctcgaactcccaacctcaggtgatctgccccctttggcctcccaaagtgctgggattacaggcgtgagccaccacgccgggcaaccttcgcttatttttaaaataaattgtacctgaatttcatgtttaaatttagattcttagattatattccacattgaaacttcttatttaatttacattaactgagcatttcttcaacaataaacacttagtattgcatttctttgaacctcaatataatagacattcctgatcccaggactcccttgttaattaagactcaaaaactaactgggaagccaaccagccattctgttacccataccaaacagtttgaaataaactgggagtgtacacattcctattatcacagaaaattacaaggttttggtgatgcctttgatgcaagtaaatcttttgtgatttatctttatctagtgttttccccaaatactcctacataaagctttggacagcaagacactttatctctctccactttagttcactctttttaatgacccatccagcttagcagtttatggttttatcatgtctaattttttatattcaccctctgaattatattttcagatatcagggtataggggaataatgttttctaagactgtgtcaattagatgttatttattaatcttaaaagaaaatgccctatattcacattcccatcttaaaatgaaagaaatgaataaatataatttttaaataaataaaatggtttccagtttcatccatgtctctacaaaggacatgaactcattctcagcgaactatcgcaaggacaaaaaaaccaaacaccgcatgttctcactcataggtgggaattgaacaatgagaacacatggacacaggaaggggaacatcacacactggggactgttgtggggtggggggaggggggagggataacattaggagatatacctaatgctaaatgaccagttaatgggtgcagcacaccaacatggcacatgtatacatatgtaacaaacctgcacgttgtgcacatgtaccctaaaacttaaagtataataataattaaataaataaataataaaaaaataaataaaataaaagataattcaagtttaaatgagggagaatctatagctgctgctgttgatcagaccattgtgttattgttttggtaataatatggtatagcatcctggattggtttttattttactaccttttttttttgaaacagagtctcactctgttgcccaggctggagtgtggtggcatgatcttgactcactgcaacctccgccctgggttcaagcaattcttctgcctcagcctcctaagtagctaggaccacaggcacgagccaccacgcccggctaatttttatatttttagtggagatgcggtttcaccatattggccaggctggtctcaaactcctgacctcgtgatccgcccaccttggcctcccaaagtgctgggactacaggtgtgagccactgcgcctggcctattttactactttcgtagctgttttttctgaggaagtacaagacaaaaggtgccaataatggcaattatggttaacctgagtgaaataaagatttgagcaggaatatatatttcaatgtgtggacagctgataggattagtagaccatgtagtgtgtctgtcacaaggaagtaaagctgactaatcaagtcttagataaaagatctgatttctagtattgaacgtcaaatgtttacaataagttcaaattaaagagaggattgaaaaagctcacatgatttcatgggctgctataataatgaaattacttaaaggattatcatttatgtgtatattttcttagcattcctatttagccaacttgataaatatgcatttgattcatttctattgaatagcaatactgtccttatcccattcctaaatgtcatcaacttcagaattgtttaattatttcttgaaattggaatgctagtacttcaaaatgatatttatagaattattgcagtgctgctttatagcattttgggtcttcttggagaaatctgttatagaaaataatgtatttattatataaggcctatttaccatgctgtgttcctacacaaaaacagtgaattttgatcagtaaatcttatctgtggtgttagtttcctttggtattttgctggttcatttcatctctatgcagagatttttatttatttattcactcttttatagataacaatagaaggctgactaaaagcattcccccctgctgcttgaaatctcaaaatataaacaaacatctttctagaatttctgatccaagaatacagtaatttttatataattttctctattcttttctgagtttccattacataaatcaatgttattcataggttttataagccatatgaaatattagcaatgagttataattagaaatcttgctgctaacctgacttccggttaaaaaatcagtgacttatattatcactgatatagactaaaaattatgtggatttgaaaacatcactgcccaacattttaatattctgtcatctgaaatagaaaatcggtcatgcctttaaaaaataaagcaaaggcagcacaggttgtaagtgttgctgctgttatgtaagtacagcttagccttctgctctacaatgcaggtttctatctttaggttagatttcaagtggcgatgcatttgtcagtccagctttctcagatcataaaatgatcatgtctgttgacacaattactgatgctgctattcaggactggagagtgattgaagagaatttcaaagagaaaatatatccagttgcaaatggagacatgggtgagtttcaaaggcagtaaactcactattcttacatcgagcctacaattgaaattttcagttccaatttaaagtaatagtttacattcataccaggtggattcctgaaagttccaattcatactcagatttacaggtggaaggacttacagaatcaattgagcattttttagttctgattctaaacacactgtccaccacttttttcccagtataagttgttaagccatctcaaaggtgttttagaaggaactgttgcacaagacaatgtgatctattcaagaattatccagcacaacagtaattgagacgaggtttgaatctgtttgttaaagttggagagcgctaacagcttaccaactagtgtcaaaattaccagtagctggctcagtgtggtggcgtatgcctgtaatcccagcactttgagaggccgaggtgggtggatcacttgaggtcagtagtttgagaccagtcggagtaacatgatgaaaccctgtctctactaaaaatgcaaaaattggcctggtgtggtggtacatgcctgtaatcccagctcctagattacaggctgggatgagaatgaggctgaggcatgagaatcacttgaacccaggaggcggaggttgcagtgagccgagatcgcaccactgcactccagcctgggccgtagagcaaaggtctgccttaaaaaaaaaaaaaaaaaaaagcaaaagattaccagtagctgacacttccttcaagatcagtatcaaacttgttctgactttccagccatctggagcccatttccctatgcacattactcacaccacttataagccatgatttgctctggaaaaacacatgtgagggtgctttgcatcagtacccgtctctctcttcactaattgtagctgctattgctccacctagcttgattcttgaattcctgattcctaaactattcctggtctttggttagattcactactttggtctttgcaatgtatctttgttttcctgattccttaccacttttgatattgaatgatgacttattgctctttgtacaggccatttaggtacagtcagcccttggtatctgcaggttccacatctgtggattcagtcaaccacaggttgaaaatattcagaaaaaaaaggaatggttgtgtctgtgctaaacatgtaaagacttttttttctcatcattattccctaaaaaatgcagtataaaaactatcttcgtagaatttacattgtatgaggcattgtaattaacctagagatgatttcaagtatacagtaggatgcatgtaggttataagcaaatattacaccatcttatataaaagacttcagaatccatggattttggcatctggaaggtcctggaaacagcatacagaggcatacagaggttgagagggtggctttgtggttaagctacctagattgaggacagctttgccacttactttatgtgtatatatacatgtatatacacatggcccttggcaaattagattttctcactttgtgtaattttcttcaattgtacaattatgatatcaatagggatgttttaagattaataaagaaatacataaaaagaactctgaactatacttggtacacagttgtaagctattagccatttttgctcttcactgtggtacttacatgtacttaactctctgctaacctaccacaaatcataaatgctacctagaattttgatcctacccttccacctttttaaccctgagcttactcaagttgctttatgacagtgaattataaatttgttgaaatgtaccttataaatgtgatctgtgaaaattcttcaaatccagtaacagatgccatatgttagtatgaatttatgttaattttaattctaaaaattattctcttctgatttattattttgtgaaaccagaattcctttataatttatagtttaaaacaaacttaaagtacatctttatattactttttggtattcaccatgtgcctagcaagcacatatatatagtgtatatatataatatacatacatatacacatactttgtcaatatacacatacatatatacgtactttgtcatacacatatgttgccatatttctatttttacagtttgcccaaattctgagcatgcaaagatgaataagatatgacaatgaatgaataaaaagatcttactaagaaaacattaaaacttttttagagctactcattacattggtattagctagaatttcatattttaattctttactcacagtgaattttataataggaagtgttgtacagcaacaatggggaatttccagaaatttcttacgatcgccacttgtggttgttttactaaaactgaaaggaagattgtcacaaaagtgaagatggatcctggcaagatggaaacagaagcagcaaagaagtgccctgtgctggtgtgcgagaaaaatgtacagagacagtaaggatggaccaagagtgattccaaggtggtaactgagcacctgagcccgtctctgtcagatacattttacttttctttgttatttgctatccttatggtaatggatccagagcattatccagtcttaccctaataccgctgcctttgctctcttttaagatttcaaagttttcttcttaaatatactctattgaggagaaaatcgccagcaaggcagtgtgaggtcttctgcacttgccagtgtctgttgggagacagtattccagtgaatatcacaggaagatatccctgatcccttctttaggggagcagcttccccacaggcagctcatttttcagagcaagaatagggctctatcttatctttttctttctgtttcttctttgtgctgttccttggccctttacttgaaaacaatacttaatagtatatccatatttctttcaagtagttttatgaattacaaataaaactaaagacaccaatggacaccaatgaataagtctttcatttatatctgattagggaaagaaactaaagacaatggaatagaactgacattctctttagaggcaaaatgcatttttggaacaaaaatacatacatttggagtcttttgattacatctttttaaaataaataatctgaaccatgactgacatttacaagactggaggttctctcgtgaaaaagaggaaagttttctaatcaaaattgtggacacatttttttctttttttcaagacggagtcttgctctgtcacccaggctgaagtgcagtggtgcaatctcagctcactgcaacctctgcctcctgcgttcaagcaattctcctgcctcagcctcccgagtagctgtgattacaggcgtctgccaccacacctggctaatttttgtatttttagtagagacggggtttcaccatgttggccaggctggtcttgaactcctgacctcaggtgatccacccacctcggcctcccaaagtgctgagattgcagacatgagctaccacacctggcccacttttttttttttttttttttttttaaagaggagaactgcttctccattgtcactctagtagtgtcatccctgagccttggtttgaggatttacaatagtaggtactaatatgaaaaacacaaaacaataactagttttaaaggcttgactgactttgagaactgaaattattcaaacatgcagctgctttcatgagttatttcatttcatggatacgaagtattttgtctctcattcaagtaactttaaacaaggggataattcttcaactatatgtatccaaccccaagataatttattatttggggaagtaagggtaagaaagtgctcaagctgcttttggtttttcagagttgggaatatgttcacatttcaactggatgtttttggtgctttgtagagatagtcattgtacttcattttagtattctgagatatgagttttccttgatatgtccttttacagtcaatcaaatttcttttcatgggcattagcaaatattaagcagaaaatattcaaatgtgtggttcaaagagggattcaatctgagagcatttgtattccacacatattttaggaagaataaagtgagcatttgcatctgtacaagtaaacaaacactgaatagaaaactgagctaaacagagctataaagtttgaacaacagtaacaaactgctagtaggtgcttcatttactgatctgaagtgtcaaatagcagaaaccctcgtaataaattgttttgctttaaaaataatttgatataagaacaattataaacaataactggacaaattaataagaatatgaaatataacaaatatagtaaatgcaggtatttgtggtaattgttcatttccaataattaatggatctgatttatgtttggatcatatttctgtgtgacaagacagggattctagtttatagctgttcttagcattgtctggtagtgacgcaagataaatttaaccatacactgttggttattctgcctaccccttagcccaggctatgaagatagtctcttggcctgagcaattaataggaatctcctttcatcatttacgtagtttgcttcttcacatccagctatgagcactctgcaacctaacttagtaccgtgtcatgggatcgactataaattgtaccttactctcccctattcacatgcaccagattaagctttctatgaatctatcaaaaagataaattgcgtctgttttgttctattggtgtttctgttctaaataattttatttatgttctttgttttgtttttaagtgtttctttgagttttaacatcataatttattcttactgctctcacattttcattttgagttataggcaacacatccatcatttccattctaaaaagaggaatttctgtgccacaaattggaatctcaaattccaacttactcttttcttcttacatttatcctattatttgccaaacaaaacaggaagttctttaagaatgataaatcttaaccatatgatgttagtaatatattagaaacaaagttatgtaatttagtgccctaaaaataacatatatgacaataaaaagaaagactggaaacaaaaacagaaaatttaagaaaaactatttctgaaaacttttataaaaataattttgtttaactatactttctatctcatttcttcctctaagcagactatttctagtttttgttatataccatgtgctttgccttttgttcttttcttccttgtgactctttttaattttagtttttttgaaatagggtttcattctgtcactcaggctggagtgcagtggcacgatcataactcactgcagcctcaacctcctgggctcaagcaatccttccacctcagcttcctgagtagctggaactacaggcatgtgctaccacatcaggctaattattattattattattattattatttgtagaaattgggtcttgctatgttatcttggctggtctcaaacttcttagctcaagctgtctgcccacctcagcctcccaaagtgctgggattacaggcatgagccactgcacctggcctcccttattacccttttgcttgatttattattgagttggtttctctaaaacttatctttttgtttttatttttatctacaatttaaaaaaatcttatgtctgtatttacacatttagtaattaaagatgtgccattttctgttcctttacactgaaactaatagcttaaacaattttaggaagcacttaattcattttaaatttcatttctttgagaaaagattggaatatatttttccaaatatgaaacaatgatacattattaaatatgtacttgcagaagataggcattgaaaatgaaaaataaaataaagtacaaaagagtaccatgaacattgggagcaaatcccattttgtatcttttgcaatttggtgagtaatgaaactaactgccctgccactggaaatccaaaatgccttcagctttcctcttatgtttaagtgtacgcttatattttgattgataagctatcattgaattgctttccagctgtatatccatttttacaaacatcatcacctaacaaatctcttgagatgagtgcagtgaaaccatattttgtattgtaatcaatacaattgggtattaggttagcctctaagcattcaatatctgagtctaagttcagattactaccatgtgatattcttaatatattcaaaactagatgtattagatgtactagagggttcatgttatgcattgggagacggagacaggttataatccaccccaagcagagtattacattgagttttattcattcatgtgacgaattcacctttcagaactacttttggtcaaacaaaatattgttttggagaagacaaggtcacaaagctggcattttaatatttcattccattttaaaagtgaaaaaaattagagcttcaacattgtgcttatttaattaaaataacccaacagaatatgtcacatgaaatgtatcagttacatggtaatgaaattatagcaatggtacaccagagctgtacattttctggaataaattttatacaaagaagagtacatttgggattttttaaaaataatttatctgttgtttattatagagatgttaaaatgggaaatagaaaatagaatctctatccaatttaagcaggaagtaggggatacatcacatttattttaggaagaagaatagcagcagctatggtgttaggcagaataagtaggtgagtgaacaggaggagggattggtggtggttgttgatgatgatgattattgctaactatgactattatgcctaccctgttctaggttctttatatggattcatccattcaatactgaaaaatcatttgaagtaaggttttactgatttattttctcagatggggaaattgaggctcagggaaatacatttagtaagttataaataagagacttaaatcctgacctaatttgaaaacctaatgtttatttaaagatgaaaattttcaaagtgccttgtcaatatggctttcaagttatgtagaatgattttatcattggaaactggaaatttataatgacaaaagatagattttcctatttaaagataaaccagaccaataacatgtataaccattttaaataaatgtaattagctaaaatgctttggccaacaaataacacatagtaaatacttaggaattttgccattatacattctattttatatttcagagttaggttaactggatattcaatcctggaaagtttgtacaatgaagagaaagtatatagaaatggattttggagtattagcttgtattgtataattctcaaaagtgcccaaagaatgatagcacatatttgctttattatgtttatgctattatttcctaatacttacaaaaattgaaagttggattatattatctcaagattgtacatacattaaaaatattattagcaccttttttgtgcaaatgctagcttaagtaaaataatatggagccaaagtataaggcatttttaaggtacatattaggcatggttcctgacttaaagaatagttaaaactaatagaggagttcattataatataggagcataatgaaattatcatacaaatgataccaacaaaattgcatgatgtgagaggagggatggaccacttatgattcaagtgatcggggacaaattaacggacgaggcatttgaaataattcttgaagaaatagtagtgtgttgacagctaggaatggaagaatggtcttcaaagcagaggcaaaacaagagtaaatagagacatgtaaaagaagatgaatacaaaaattgagtgaagcatataattttcatatgggcattttatgtgatgctcaaaaggtagattgggaaagagtgtttgagggcataaagtcaggttactaatgtttattttgctttgtaacctgtgagaagttgtaaattttcattagagaagtaaacaagtaaacaaagagaatgttaagagtatttttatctgtccccgatttctatgtgcaagatggattagaagagaaagaaagctagctacgttccctttgtggtagtcaaggaatggcattatgataaatggttccagcagggccagaaaaaaccatggatggataaaaaaaaaaattacgtatggttgccaatacagggcataaaactgagctgaaaaaaattggagaatcaagaagaaaatgtttaggccaaatggtgaatccatttgtagacatgatgagctttatgtctcatactttagttctatctcacagcgcttggtcagcaggacattggaaatgttctagttcataagtaacaagatcaggattgaagtacagcaatgatgtttaaggccaaggaatagttgggacctctgacaaagacaagtcaaaaaatattaaggataaaaccatgggcagtcataggggaactatcaacaagaatagtgaaccagcattcatgacaagagagaaataatagtgatagtgttcagatctcaagtaaggagggcttcaaaaaagaggtagatagaaaagaggccattagatttgaatgctgatacctttctcgtgagcctttaaaatgaatagattgtaaaagctattttgcatggggaagatggtacaggggacataaaacattgcttctaaaggtatggtgaagaaagaaaaagaatgcagcagttaaagaatacaactatgtcacagatggtattttcaaggcatgggagaccagggatgtttaaaaagcaatacagcaatattatattatgttatattattattttatttaataaatatggtattttattattttccttttttgtatttataattacatctgtatgtcagagtccaggctgtgtatttgagttttttcctctcttttttttctccctcaattagacttgccaggtatctgtaatttcaactggctattccatagaaactgttcttggattttctttttaattaattcaccattattctgtttctaagtcttttattattaattattccctctacttcttatagtattatgtatcatttgtgcctaccctctataattaatactaagttcatttatttttattattttctattttaaaataaaacattgaataatacaaatttttgttataagtacagatttgtgtgtaacacttgagttttgatgcagctttctcattatcttttatttctaaatggtcttaattgcacttttgacctgactaattggaaagagttattgtttaatttctaagtggttgcattatatgtttataattttatttatttctagtttttctacaaagttatcagaaaatgtggcctaaacaaagttttctttaaaaaaacttttaatctattaagaaatttatgattcatttttaaaaatactttttcggccgggtgcggtggcttatgcctgtaatcccagcactttgggaggctgaggcgggtggatcatgaggtcaagagattgagaccatcctggccaacatggtgagacccatctctactaaaaatacaaaaattagccaggcgtggtggcgtgtgcctgtagtcccagttgctcgggggactgaggcaggagaattgcttgaacccgggaggcagaggttgcagtgaaccgagatcactccactgcactccagcctggggacagagggagaccgtctcggaaaaaaaaacaaaaaaacaaaaaaacaaaaaacattttcactctactctggaacttgtcaatttgtcatttttctaacagttttttttttattgctgtttgctttgttgcccataaaacaacatgcaagttatattttcattgagacctgggtgcttggatctagattattcttattatattcttacatttacattatatatccttcataactattgttgataatgtaatcctgttttataatgaactttactcacatttttgtaggtttctcacatgtttcagcaatcacagtcatttcttttacattatggctcctttattggacttctcaagtttgaatttgtagtttattgcattacatattcaggtaatttttcccagtaaagtgtctttaaatgttatattttctgaatgattgtatatctgagagtttctctctagtcctcaaatgtaaaataaaccttgtcatattattaattatgtgatcataagagtttctcctaaaaagtattacgcttctttttattctgcatttgtattgtggcagaataactagaaatatatgtataaacataaactacaaccatttagaaattaaataataacttttcagtaagtcacgtcaaaagtgcaatcaggaccatttagaagtaaaagataatgagaaggctgcatcaaaacttgagactatctttttaaaagatttttactagatgattttgtcaggggtgggggtccttgcttgaattttattgggcttttctttaacttgtaattccccaccaaaataatcttatgttttgtcagttctttccattgattttgactttcaatctatttgcacagatgtttcttcagaaaaaaaaaatctttcctcatatctttgattttatttttctataacagctgtttggatttccccatcagaaatgttaatcatctataattctctcaatagcctctgtcttctcttttcttccatattttccattatattttccatgtctgtattgttttcttcagtggtttgaggaagaagctttatgtggtttctacattaatgatttgattttatacaaactctaccctgtacttcattgttttctatgtggatttaaatttgacatttcacttttagctctccctactttgtttcttatctgtcttccttttcagttaggtttcttaacttttcatttcaacttgctcttctttaaaatgcttattaaatttatttatacttatgattttgaaagtccattggtcccactaagctcgtttcgaagatggcagcccctagtacttctgcccctagtttcagatgcccaaagtcaactacagtcaaatttttaaattaatgggtccttgatgtgttttactcttctctcctgaataacttgctcacactttctacttcttacttttctgctatgtttgtttatattgacttctcaccataggaaatgaggaattatctcctttatatctattttaaccctgttatttacacttcctctcctatcatcttcccaatgtagctacaccataccttacattatcatgggcatatagatgctgctcataactgtgtcacctgttatgctttgattacttttattttcttggaaattttttttgttgtccttatagctagtaaccgtaatttttaaagttatctgtttaaatacttagtgtttctgttttggtttttatataattaaagtttgttttttatatacttaaggacgatttctcccaaactttctaccagaggatatttggatagttaaccagtttatgtcctttttttttttattattatactttaagttctaggttacatgtgcacaatgtgcaggtttgttacatatgtatacatgtgccatgttggtttgcttcacccatcaactcgccatctacattaggcatttctcctaatgctatccctcctcatccctccaccccacgacaggccccagtgtgtgatgttaaagttcatgttcttagagagtctctccggcttctccaatttagactggtacctgtctaggtggacagcacagcttgcatcctaggatctcccttgactgccgttctgaggatattcttcgcatctttttgtggtggattcacatcttttttgtggcgtatctcctatttcctgtagccaactccccctcttccttcacttattttcttatttaggttcagcacatcaactaggttttttttttcattttgtttctttcgttctccagaatcttttatgatctatttgttctcgggattctgacatttctgcaagatataaactaatgtttgtatatttttatatgttgtgctggaatctcagtagaatgttttaatctagaatttcatatactttcattctggaaaaattttgatatttttgtttaatgattccaactccctatttgcttttccatgaattcttcttataattattgggcatgctgaaattatctttaattaacttttttgcttcatttatttctgtatgtctttttgcttaaatttctgggagattatctcagctttaccttcaaattattctattgagtcttcatttctgagattataatcaattataattattatccagaattataatttattatgaataataatgaatgataatgtatcagatatattattaaacataataattatagttaatttattcttttatgctttctgaattttttaatagaaatttcctatttcatgcatctatttttaaaaaaatctctggagttataataactttagatgcctccctctccatgcattggggaaaaagactattttccccaaattacttttctctctatttgtttaatgttgattttgcatggcagaaaatttctttaaatgcccagtgatctttggacttccatttatatgtaagggtgcactataacgctgatttaaaactctttgcacttggatgagtctgttgacagagaacttcattgaaaaatcacctaatatcataacattttgatcttttatgttgctaaatctaaaaattcccaaagatgaatcttcagatcccttgttaattgtgtaaggctggctaatagtattccatgacctaggtgggaaaaaagaactggaaaactcaaaactcaggattcagatttttacttggtaaaactaatttcacgatggtatcccagtaccaactgtgccaggtgccttgcatccaaaaaaccccttgatttactttgtagcaagagttccatttagggttactttgactaaaacatgctaaattcataccaaaatgattatgatgcctcatatggaatgtaatgactagaataatcctagctggagagagtatcttactgtaatgattatgagggaaaaggaatcactaggatgtagcattctcaaaccatgaaacaaacatttaccttattctaagtgtcctgtgagaaccaatcctttaaataaattactaccaaattattttgctgcttctttctaaatctgttttaaacttaccctttcttttctattctcagtgaactgattgcctggcctgactcattcatcccctgctcctgtctaaggcctcccctgactagggccatattcccttcacttggacgattattttaaatgccttatgctgacttcactgtctcctatctcctctgctcccttttctggatgggatgttcctaatagagttggttttcaaaacattttggctacctattattggtcatgcactgccccgggagcattgaggagagacagtaaaatgtgattcagtagtcaccctggactcgaatctattggacatcatttaatagctgtgtgatgtgatgcatatcaactactgttctgtatttctttaaacaaaatatgaggaaaatacttaactcacggggttgttataagcactaaatgttaagtgattagaacaatctgacacatagtatgtcctcaataaatgttattattattactattattatcatctttatgttttgtttgtttactaatataaaatagcttgccactgaaaatattcattccaaacctctttggctatctttaacattctgaagacacgtgttcctgtaaccctctatagattgcattaaatgaacgttgagtcatatgggctaacactgaaatgggtaagtgttttgcactgaacagaacatctcctatgttgttcaaaatatcacagaataatttaaaatgaattatcttagtttctgcatgcaggaatcaaattagtacatggaaaaaagaaatgtacataattaaatgaaatattctgaaaatttgcagaattgccattagggagtactagttctgagctcattttagtattattaacttctacttattagcaatgaaggatcaatttaattagatttagttattataaagtactgaccatatagattcaatgtaattatttatgtataacatttaagtcatattttaaaatttagctgacttttaagtttaaaaacatgaatactatagtacttttaaatactattcacaaaaatatcacattaaaatagctaaaatagtaatttttatggtaaacattcagatgaagtaatcctacctgaaaatatttttttgaaggaaattatttgaaactctaaatttggccatctataatataaacatgaacatagtaacaaaaacataactcaatggcttcaattaaaaatggtcactctgtgatatccaaattagaattatcataagttaaaatttaagggaaaagattattctacttcaatagtcttgcaacaaataccatatgtgccctgcatatttgcatatgcactgtgttggggtgaagccttataataaggttattacatcccatttacccaaaatattacaggtctgacttcctgcacccttcccttaaaccaccgcatccacaatacatacgccaacatgcacactcaagatgccaccatccgtggactcagagttaaggggagaaggcactcttttacgtggctttttctgcatagaacttgagtgaaagatggggcacttcatgtaacaaatatcagaaaccattattaagagctgagattgtcggacgataaaaacaagtaatagcagatctggatgaaatccagagatggtggcttttgactttttgcttctgatataatttttagacagaccagctgtatttaatgatgggtagagcgtggatatcttttctccagtgctcctctcagtcctaataaaggaacctgcagagtttctgtcttccacatcatctgttcataaaatactttgaaggccaggtgcggtggctcatgtctgtaatcccagcactttgggaggccgaggcgggcggatcatgaggtcaggagtttgagaccagcctgaccaatatggtgaaaccccgtctctactaaaaatacaaaaattagcagggcgtggtggcgtgcaccttagtcccagctactcgggaggctgaggcaggagaatcgtctgaacccgggaggcggaggttgcagtgagctgagatcgtgtcacctcattccagcctgggcaacagagtgagactctgtctcaaaataataataataataataaataaactttcaaaatattaatttgttaggtcttccaaacatccttgtgaggtatgcggtcagggtacttagtctcctcaaaattagcttctctgaagctgcggatgacataatctagagaccacacagatttaggaaacgataagtttagtactcccatctgcctactgcctaaagccaggcctactcaaaacactaaatagagagaagttatacatttctagtcatagactagtttatcacatgttctatttattaatcaagttatatatttatcaaacatggaactcctactaagtcctaagtcttatataggggttgggtggtccttgagattaatgtgctgtcagtctggtggggaaataaacacatcaacagataatcaccatataatgccaaagtgttacaataaaaatatgtcttggaggaggatgaaatacagaggaggaacatatctacctgtctggagcaaagtagataagagagacttcacagaaaacttatctcatgaaggtaaccaaggcccctaaattttcaaatcctatggttatgaaatattactgtcttcatacattgccaactacttcatcattcctgaaattaactatttgattggcctcttgcactgtggactagattcttccctagttaccatttgatcatgtttttacatcgttttccactggtcttcctgagtgtgcttcttaaattgactctttccagtgatccatttgtgccatcttctctttgtatttttcatcatgtctgtgggagagagctctctcataaatattcatgacctcaattgccttgcatatacctgtgcctttgaaatctttacctctaggcacacttggctcacaaacccatgaactaagtcatgatcggcctttcaaaaccagtcattcccttgtacgccccttttcagtgaaggataccactacctattcacatggcattttagtctttcttcattcattcaaaaatagttattgatgcctattaggtcttagtcatgatgttaggatctggaacacagtggtggaaaatcagacctgacttctactcttcttaggaaaataaacttttaattagtggcttagcaaagtacagttcattacttgcatgtgtcagaatcactagaggaaggagggattcttttaaacatgccaacatagggttctttctcaaacctatgagttgtaatctctaagaacgagaaatatgcattttaagtaaacccttaagtgattcttaggaatataacctaaaatttaaagcccactttttaaaataaaaataaaatcaaacaaatacataatcatgtactgtaaaagtccatggaagaacactaaaaggactaaggaggattgctaaatgatggttgcgcattgcctgggagttagacagggacaagatcatgcatagatgtccatgtaggctggtttattggatttatgtatgcagtggaaagaagtgaaacactaaggatggatgtcaaatcagaaaactagatcccatcttttcattcatcttttgcccttactctaccatgatctctgttgtctttactgtatctcaaatctatcctatcttcttcatcaccaccacttagacataattcacaaagtcttgctttgcctgacattatggcaatatttctctaattcatattcttgcttctctgccatcctccctctgatctgtcaccacagtgatttctctaaaattaaaaaataatactatcatgtcatatatttgcctaaaagtcctttaattactcaccacagctttaaagaataaagtctggaaactagatgctgcttacaaagcccttcgttatatggtcactgactgtcttgtattgatacacaccatgttctaatcatgccatattgcttacagtgattacagtgtacatttgcttataggattcatccaacctgaaatgcctttctttgtcttctccagttccattttatctttcaaggcagtctcacctcccctgagaaactttttacccctgtgctgatgctgaagtgccccagctctatgttcccctagtatcctttgcatgactctttaacatcacttgtaatttttataatcattactgattaattgactttctgttccctggactgtgattctatgaaagaagaaactgttttattcctttctgtatgtacagtccctagtaaaaatccacgtttattagctgacaaatgaggtatcttttgactatgctttagtaatacaaatgccgaccctttagagcctaaattagttttctagggttgccataacaaagtaccacagactgggtggcttaaataacagaaatttattttctcatagttctggaggccagaagtccaagatgttggcatagttgtttttctctgaggcctctctccttgacttttagatggttttctccttgtgccattccatggccttccctctattcatgcctgtgtcctaattctgtcttcttgtaaaaacatcagttatattggataatgtcccaccctagtaatcttattttactttaattacctctttaaagattctgtctccaaatacagtcacattctgagatattgagggataagacttcaacatatgaattttgggaggtacacaattcaacccataacagaattccttagcactaacgaagtatttagtgattagaatgctacgatctcaagtagctcttagctccaggaatctttcttgtatgtacctttgtacctgataatctgtatctaacaaatttagatggtccttgaagaagcagctgatagaatactcacatttttcccatggccattgccattcctcagattcctgtcatcatctttcatctggaattccgcaacagcctcagcgtgattgacttctctctagtcttggactcctgcagtcttctttctacgctacagtccagagattctaaaacgtgactcatcatctttatcctggctatatccctatggaagatcccaactaccttcaggatggcatccaaactcctctcaatggctcacaaggcccttcatgatctcacatgtaccctctttcctggcctgtttcttgctactccatccactgcttttatctaccttcctgctattcttaatacttttagttcctccagtttgtcaaggctttttgaaactatatattagtaattttgttttttgcctgatgtgctgttgagctcctcttctgtgccttgtctcctgtgcaacctccagactgctgtctgcacatccatgaaccctgggcttcgtggtcctgctgtgtgctcctctagcagttccatttcctcatccttctgtaagggagactcactgtgagctgtgattggcctttgtttttttctctccccatctacgttgtgtctggagggcaagaaccatgtcttggtcttgttgaattctcacattgaactttgtgccttaaacaaaatgggcatggactatgtttttgtacagcattataggactgagtcttaaaaccacttgaaaatatctacttaaatagtctccacattttttaaataacagctttatagagataacttacacgccaaaaatgatctctttcaaagtatgcaattcagtggttcttcgtatattcacagtgttgcacatccatcaccaatatctaagtttagttcattttcatcatcatccaagaaatcccataccctttagtggtcattctctatttccttccccctagctcctggaattcaatggatttgcctattctggatgttatatataaaataaaaacatgcaatattagtattttgtgattagctgctttcatttcttagtgtaatgttttcaaggtccatccattttgtagtaggtgtcaatacactattccttttgattgctaagtaatatagatataccacattttttatcctttcatcagttactggtcatttgggttgtttctggttttggggggtattatgaataatcctgttatgaacatttatacacaaatttttgtgggaacatatgtttttaactatctttggtatatacctagaagtggaattgctaggtcatatcaaaaccctatgtttagctttctaaggaattgtcaaattttccaaagctacagtaccattttacattgccacagcaatgcaaagaattccaaatgtcttcatccacatctttatcaacacttgctattgtctttattttttattataatagtcctagttggtgcactggttttgatttagatttccctgatagctaataatgttaggtatattttcatgcactattgacaatttgtatatcttctttgggacatgtctattcaatttattggctcatttgtaattggattattggtcttttaactgttgaattttaacagtttttaaaaaatatattctggatacaaatcccttattagagataataatgacttgaacatatttttgcctatcctgtgggttgtcttctaacaatcttggtggtgtctcttgacccacacaattatttaacatagatgaagtgcaatttattttttttgttgttgttgcttctgcttttggtgtcatgtctaaaaaacactgcctaacacaaggtcacagagatttactcctgttttcttctatgagtttttaagttttagttgttgcattgtgtcttggatcctttttgagttaatttttatatacagtgtgaggtaggtgtataacttcattattttgcatatggatatccagttattttggcatcattttttgaaaaaaaaaattctttattgaattttctttgtatcttgtcaaaaataacgtgaacatacacgtttatattataaatgtgtatgaggtttatttctggactctctagtctatgccactaatttgtttattattatgcctgtactatgttgtcttgattatgacattctttgtaataagttttaaaatgaggaaatgtgaatactccatctttattctttgctttcaaaattttggctattctgggtcccttatatttccatataaattttaggatcagatgatcaatttcagtgaaggagccagctgagattttgactgggattgtgttgaatatgtatgcagatcaatgtgggaaatattgctatcttagcaatagtaaatcatctgattcataaacacaggatttcttttcaactatttatactttttttttcactttttttcaatgatgttttgtagtttttcctggataagtcatgtgcttcttttactaagtttatcactaagtattttatttttggtgttaatgtaaatgaaattttttccttaattttattttaaattgtctttaaaataggagaagtcttcgcacttttaaaggttatatagatctggaacatcacaaaaaaacaggatttcagcttgggaatcatctcaagcatattagatttttcaaaggacacgggccactttgaagaagagataaatattgttttctttgtggtcacttaaagctgtacatgactcaaaggaaatgcagaatattaagaaatatatatatagagagacacatataatgcatataattacataattttatattctgttatcagattaactgtgcaacatgtactcattcatgtgtgaatcatgtgatatgcaaaatatggcactaaagtttaaaattttaagtacccatgcagattgtatgcatttatatgaaatttaatgagtaatggtttaaaaataatcattagtgtctctggaagtaattgcacatgcagtcttccattacttaagtcagaaatattgagttttgaatatcgaggtgtcaaactagtcaacaaaataattattaattaataataattaacaaaattattacatgtagagcaagaggaaatgtgttaagaatggtatgactaagtatcagttatctgtaaacaatgtatttaaaattttcccacatcctgtatatggtaagcacattaaaaaaataccacttgatatttaggaaaaacattgtattagagatattagattgagagttctgtaatgaagactgaaaattattaattataatggggattttacttgttcaacattcttgtaatcattcttgtaatcctttcttcaggagttattaaaactatacagaagaaaattattctctaaaaattatattctttttaaagagtttataaaacagtactcctagttgacttttctgaaaagattgaaaatttaaaaatgtaagcacactcacccggaaactttggtttcacgattctttgtgtacttgtctgcaataataacaggatttgacagcagaaaccagctgatgacttacattttctgaaatgcactggattgaaacctattgaataaatcactattggtaaacattgtcaagataagaatgggccatttttttgtccctggaagatctatctatataactatcctccatttgttataccatgtatttcagactgaaaacgtcttaataacagaataataccaaaggtgaggaaggcaaattttaaaaatatatggttaaggcatctctttatacttataatgaaagatggtataatttgttaatatagcaataaacagggttgaataatctttgtttatgctttgtaacagttgtggaaattaggcagttttcactttcaaatagtgttttttttgtttgtttgtttgtttgttttttttgacggagtctcgctctgtcacccaggctggagtgcggtggcgtgatctcggcttactgcaagctccgcctcccgggttcacagcattctcctgcctcagcctcccaagtagctaggactacaggcacctgccaccatgcccggctaatttttttgtatttttagaagagacagggttttaccgtgttggccaggatggtctcgatctcctgaccttgtgatccgcctgccttggcctcccaaagtgctaggattacaagcttgagccaccacgtccggtccaaatagtgttggttttaatcatcatttagcaactatgtaaaataagttgttagtctcaaatattactgtatttgtaagatccttgttcaagcatttgttatttgtcctttcttgaagtggatactagttggttttcagactttagctatgaaatcaattcacagcatagtttaacaaagattccttgatgaaaattaagtcatgcatatttagcatgcatatttaacatatttattaaaacataatctgtaaactataacattacagtctcctttataataaaaatgttacacatattgcttatttttttacttaaagaaaattcatagctgttaaaaaactggtatttttcatattcttacaactttatttttaatttatgaaaaacgttttttcattggttcaaaacattaaaaaattgtcaaggaaaatttcacatttagcttataatgataaatagttatcctatgtaatgaaacctaccgagtataggtacatttcttttttaacacatcttatgttgttctgagaagtaaagcatattgagaattaaagcttccgacatgtggttagagaaactgacctttaaggtttcttgaagtttaatgtttccaatttttttttgctgtttttcattttttgttttgttttgttttgttttgtgttttttgagcaggaacactgtaaatctatggaagttcccaacaaaatgcaattttgtttctatagtaattagcttttaaatataaccttcaaaaatgtattttcttatcttatgagtcccttaggttgtaaagttaattcctgaagcacccagtggagcatttcattttttttctcagtatttttgaaagaaatcactgtgtgcttccatttacctttatttctttcttcctgtaatcttataagtaaataaaatataatatttttaagtcattaaaacccaataagaaactagagggttataatagattacatttcctttgtagtgagctgacaggatagatctaatagtctcaaatgccctgatgacatatgacagatgaagtagcatctactttctcaagggaggatatctgaaattaaagacacaaagtctctactctgaggagattcgacagccctctaaaaggatagagcttgaagactacagttctctggcctcaaccattcaccctagattcaagaaaggaaagcattcttaagtaattgttcatgagaacgatttcagtcacctgattgtcaaagagtaagccaccataagaatgatgaaggaatattgctaaagctacatacttcgggctgctttggaagtatacagtcgctgtccctgggtgtgccttctggatagataactacactgatattaaaatgaaagtggccaccaagtagctaagtttaatttgagctgcattcattttctgttgttgcagaacaaataactccaaaatgtagcagtttaaaacaataaacatcatctcacaacatttccgtaaatcagaaattcaggaacaggttagctgtgttttcctggctcagggtctctcatgagtttgtattcaagatgtcattcagatgtcacctgaaggcttgactggagccagatgatgactttctaggtggctccttcacacgcatgggaagttggtgcttgttgtggacaggaggcctccattctttccacagggctgctgagagttttcatgatgaggtaggagggacttggctctggaggtgggacttggacactggaccaaactgaggactagctaaaacagggacaggacagaagcagcttcccgtaagacatgcccaccattgccatggcagttacagcctctttccatggcagcgacctgcaacctagtagttattacctttttcctagaaatttctgcataatccaccccttactctgcatgcaattgaaagtaggtataaacacaattgcagaactgccctgagctgctgctctctgcctgctgctcctgctctgcaggaacagtcatggagctataattgctgcttcaataaagctgttttcttctaaccaccatcagcttgcccttgaattctttcctgggtggagccaagaattctggcaggcttggtcccactttggggctcgtctgtcctgcatcagtgacactggagtgcttccactcgagtgaattatccagcagagagcaaggccgaaaccaaaatgccttttatgacctggcctcagaagagacgtatcatcatttctggaatatactattgtttacacagactagccctattcaaagtggcagcgggccacaggagtacatcaattttcagaagtgaggttattgggggccacggtggagactgactaccacacagtatagtaattcttttggattattagtaaaggcgaacttatgaaaataagttgttctttttttctgaaacattccttcatctccctttgctgtgcctcttgagtaccctctatttccatatcccagtacttccaagctgtctccttattcctcagggctctgctctagtgcctttcccatcctttctccctcatgaattcaacaaatatgtatcgagggcaaattgtatgccagtcactgtttgttcacaccagtgaaaaaattactcacttcatagagcttaccttttatagtagctgcttttcatagtaagtggtctcccgtcatctgtaattttcagttttgtcctattagcattctgctaaaattactgtgtctaataagaaaagcaaattaaaggtaagagatcaatgattggtgctgtctctttcacgaactgcttgtatctcgatagagttattctatgatttaacctgaaagcataaggttggattttaaggccctgaagcgatactaagcaaagtggggaaaatctcatttgtactaatttccctgctttaaatcaccatagggccactttcgttcagtaaaaaaaacattaccatcaagttatctcattcagcatggtgttttgcacaacatggaaatgcaagactgaagaaaaaaaggatatttcaagcctaaacaggggcaaaacacattaatatagttatctccatgaacacatgaggaaagtcagagattaactcattttgccatttcctttcaaaattgatgcagtgtgatttgaatttccctaagtatggtagaaagacatggatcatcttttatatatgtttatatcctagcccagtgtttcagggattctggcatttatatttgtgattaactctaaagcatctttctacggggcttcttcttatttttttgtattttattttttttagttttaaaactgttttgaccaataaatctctctccagatgtcacattggtcagcaatgaggaggtaaatggaaactaatgacactcatcaagttgatgaggtgaatgatatattggatccagtcacttaacactttcataaagtcaatatcaggggaaaaaaaacgagactcttattatggtaaactgtatttgtactgtcagcattctgtgattcattacaaacccgtggctaggattaggatattataaatgggggaaaaatggaaggctcattaattttttatacccacaggtggaagacatgcagtgggctcatagagaacatactcacccggcgtctgtctgcagcctgccgtgtaagccaggggagaggaagaaaacggtgaaaggggtcccttgctgctggcactgtgaacgctgtgaaggttacaactaccaggtggatgagctgtcctgtgaactttgccctctggatcagagacccaacatgaaccgcacaggctgccagcttatccccatcatcaaattggagtggcattctccctgggctgtggtgcctgtgtttgttgcaatattgggaatcatcgccaccacctttgtgatcgtgacctttgtccgctataatgacacacctatcgtgagggcttcaggacgcgaacttagttacgtgctcctaacggggatttttctctgttattcaatcacgtttttaatgattgcagcaccagatacaatcatatgctccttccgacgggtcttcctaggacttggcatgtgtttcagctatgcagcccttctgaccaaaacaaaccgtatccaccgaatatttgagcaggggaagaaatctgtcacagcgcccaagttcattagtccagcatctcagctggtgatcaccttcagcctcatctccgtccagctccttggagtgtttgtctggtttgttgtggatcccccccacatcatcattgactatggagagcagcggacactagatccagagaaggccaggggagtgctcaagtgtgacatttctgatctctcactcatttgttcacttggatacagtatcctcttgatggtcacttgtactgtttatgccattaaaacgagaggtgtcccagagactttcaatgaagccaaacctattggatttaccatgtataccacctgcatcatttggttagctttcatccccatcttttttggtacagcccagtcagcagaaaaggtaagtagaaggaaatacacttgacaactttttcctggatttaacatcttcttttaggatgcttttcctccttttatttggttcacttatattctctaaagatgcttcagtctgtgctattcttacttagcatgcatatatatatatatatatatatatatatatatatatatatatatatatatatctccatccgtcaaggtcacattgctttgaatttgtgttgacaaagcctgattttccatgaaaaacactttaatgtgtcctccttggcaaggttgaagattgacaaagctcacatcactttctgagtctcccttcccagctctgctatctgctaacatcactgttcttttccaaatgttaattaaaagaaggaggaagaaagggcagacatggttcacaggggtgagctgtccccgagatatgccactgcatgacaaatgccttcttttttgttctaaagtaactctgggataaagccattgcttggtaattgtgatgattttagtcatggaagcagagtttatagtgaaataatcacacacacgtataaaaactgaatggcttcgttcagtctgaaccatcttactatttcttctcagtccccattcttgttactttttcatatgtggaagttgatgatgagggtaaagaaggcaatcatggacaattatataaagcagcttataaattttagaaggcaaagatcaatggactcccccaaagtaatttcttttgtcactaatctcttgttaatgttttccacataaaatactgctggtaaagaatatctgtataggaagggagtgtttgctgggttggatgttgtagttctatgtacagaaaagcagagaactaagggaactctgaattccacttttcgggtagtgggatggagataaaccagcttgaaaaacagaggagaatgctgtatttctgtaatgatagcccttctgccctgatgggcatgtgagagagtcctttcagagtgaggacttgattgttccatcctctgacaccagaaattgtgagaaaaatgaaacgtcatggggtaattacatttcccaggctataacattccaaggaggttctgcatgacccagcagaaaatcccagcaaattcacagaaaatttccacaacaacgggacagaaagctcattagtatgagtattcatcccttcctcaatcaatgtggccttcaactatttttggacaaataatgtacttcagcaaacttgctgctgaagagaataaacttgtgattctattaaataggttttttgaaggaaaattttacaaaataaccattttctctcagaacaataacattgcagagttgtagaggccccctgaggagcagtgatgaagataagaatttcacagtgaaatggacacatgaatatgccagagggtggaggttgccctgtgttgctgagactgtgggaggtgttcatttgaaaacctgggggttatgcataattttatgggtgtctatatagctatgcctatgcagatatgattgagtgtggcttgcaaaattcctttttctttcttagctttctgaaatcaaactaaatctaagaagcacactgaaagacacattataaaatatgttaatggattcattttgtatttataatatagttgaatgtgaaaaaggctaaagaaatcaattaagaaatgctaactctaggaattttgagaatattttagagcccacaaattatttagtcatggaaatgttgaatttaagttagctctacatcaagggctatcatattataaatagctaagattttggtactgaggtacttcacattataaaattttgtattatcctaaatctacatctgaaaatttgctacctgctattctctgtccaagtttcttttattattcaagacaatacataaaatgacaagcctgggaaacataacaagaccctatctctacaataataaaaataaaaaaattagccgggcatggtgtcgtgcacctatagtccaagctgttcaggaggctgagacagcagggattgtttgagcccaggagttcaaggttatagtgagctaggatcatgccactgccctacaggctgggaagcagagtgagacctggtctctaccaaaaaaaataaataaatgcttgagaatgtttaagttttcacattgcttaaattattgacatgaatattaaaaatgaacaaaacttgtatatctctataagaaggctttaaatgttgtattgaccttggaggaccaaagagctggtcagtcctccattttcttttgtactgttcagacaatcagccccatgttatcaacttgaattgtttactacagctagctagcacacacatccattaacccagcagctccttattgagcattgtgtccggcattgaactaattattgagcccatgtcagtcggcttccctgagcctcctttgcaaggctgagtctggctcccagcccatgccttcatgatgcctgccggcaccagcaaggtgccaggctcaaagtcagaaaaggatcaggctcaagggcgggggaagatggtgaggggtcagatctgtgatgagaaagaaaacaatagaactgtgcattctgcagctgtgcattggtgacaccgaatttccaacatgtagaagagcaaaatgtcttccagtatgcatttaattgtttcttctcagaataacgtcagagaatgcatcgaaccacacaggtctctctgaaattacaagaagcaagaataacaactaaacttagttgaaaagtttagacagatgttttggaaaacatttgggtaaaatgaagttataaaggacacttgtagcagttatgaagacagagagctttctgaagtgcctttattcaatgatatatcatttaacttccccacattcctttgtcctctgtttttgaatgaatcattttgaatgaatcaagatgaatcatttttcccaatagattttaataacatcatttgtaactactgctgaattcaactaaattatggtataaatgcacctttggtttccctatagaaaagtggtgtgaaggaagggtagaccactgaggcatggccatgcaataacacaaactcacataattgtactgaaaagagaaaaaaattaaaatgtgattaatagtcaggagaagtatccttagggatggtaaggggctgtaaggatggcagaaatctctaaaacacatattttatcatccttaattgggctcataaaatcgagataatcagacaagggttatgacactgtcaacctccaatgagcactctgcctcttctagagcatccgatggaaacaaaacaaaacaccctcaaagtggaaaagaaaataaaactcaaaaaggcaaaaaaagaaaagaaaagaaaaaacctccaataaatctcaaaccagattttcttccagtggcctcaggatgcatagcagcttaagtcagaaagctggttgtcaccttagactcctccctctactcactcctgcccctttactttacttcctcttcttacttttaaaagtcatcgttgttgtggacaataagcaatgtctgtctgaatgaatatgtctcttaacatatagctcttcttatagtccattctcaataaatgcctattcaatgagctaatattaatgatataataatataaatgcgtatttgtgatttaagttagactatagcacaatgggaatcttctgtaggcatcttattgtaatctccattataacaattttttttttctgaaaaaaatggtttcccatttaatgatgggtcatgtagatttttttctaaaaagttgtcattatcacttattctcaaataggactactacatgtttaaagagaagagcaagcaagaattattatagttgtcctttgtttcatccagaattcacaaagcaaaggagaattgatgcaactattgagatacttttgccatatcacccctcttgttctttttctctatttatctaccttaggggcagaagagtgtaggggtacacaggtgtgccagtggagtaagaaagagcataagctcctgaatgtgaaatcttgggttcaaatcctgtgtctgctaaatagctgagaaaacatgggcaagtggctatgtatctataggtggtaatgagttccccctggacaatacaaattccaatacaaagcaatgtaaagcaaccccctgccatcacccccagccctgttctcgaactagagaagacttgagttcatatattctggggaaaagcaggaaaagggttgattatttaaaataaatacaaacacacacacacacacacacacacacacacacaacttcttttgtctctgtatggtgtgtttttttgtactaataactcatatttattttgctgaaagttagatgacaggagtcatgaaaagtgtttcatgcacataataggcagtgaataaatgttggctatcatcaccattaggctgttacccatgagggcaaggactttatttgattttgctcaccattttctcttcagcactcagcataatattgagtctgtaataggttctttaaaaaatatttgtttaatgactgaatatattcgaatgaattgcgtaggaggatgtgatttgatttatccaagtaattgtctcaatttcacctgccatttagaccatatctgagcagacccccaactgaaagtgttttcttattttgttgttgttgttgttgtcgttgttttttgagatggagtcttgctctgctctgtcaccaggctggagtacagtggcactacctcggctcactgcaacctctgccttcagggttcaagtgattcttctgcctcagcctcccaagtaactgggactacaggcacacgccaccactcccagctaatttttgtatttttaatagagacggggtttcaccatgttggccaggatggtctcaatctcttgacctcatgatccgcccgccttagcctcccaaaatgctggattacaggcatgagccactgcacccggcctgaaagtgttttcttaaacatagaggcttgcccgaagagtagatcttacagattacagcagttaaagagggctgtgagggagagaagaatctggagcatttggagagaggacagagttgttcctgaggcagtgtgtacctgccttcaaatatttaacagacaatactggaagaaaaaaaatatcatcagagagcagttgctgaaatctttgtattataatttggaatgtgaataattctaatattcgagaggtagtttggagattagtaataaaattcctgctctaaggaatagtccagatgagaaaagaacagcctgaaaatcctgcggaaatagtgtcaataacctggacaaggatggaagagatttgcagaatagatcaaactggaggaaaattttcagctgtaccttgtctcctgacatttctccatttccttaaaggagggcagtaaaaatgattatcagtatccacattgtatgtttgtaatcgttaatcactgcatataactatcttaggctacctgttggtaaactatataccattttcttttcttttcttttctttttgagatgaagtctcgctctgttgcccaggctggagtgcagtggcgccatcttggctcactgcaacatctgcctcccaggttcaagcgattctcttgcctcagcctctcaagtagctaggattacagatgtgcaccactatgcccagctaattttgtatttttagtagagatggggtttcaccatattggccaggctggtctcaaactcctgacctcaaatgatccacccgcctcggcctcccaaagtgctgggattacaggcgtgagccaccgcgcccagccaactatataacattttctttccttgtcagttcacagtcatttgaagcagatcctttttaacggtgccacattacagaactatttaatgtattacggtcgattttttgtggacaagatcaattataccagactgttgcaatctgctctggaagggggaagtaaattttaaaaaaactggaaaagaaagcatttatgtggcctcatttatgctcttaatttaaatgatatgcttgtgaagattcagaggaagcatggaattctcatgtagggcacatgcaggcaggactgccaagtggctctcctagggaatgctgccttatataagtttttgtttttgttttttctgattgtgctacatattaatcctgcagaaaattaccaactttaacatttggaggaattcttttgggggaagccatcttctttgatagcacaaataaatatttgctcaatgaatctttttagattacacatcctacttttgggggttctgaggaagctgtggggctgaagattacttaatttaagtgttgattattagtgacattgtggtatttttcaattgaaattgagtttacaaacagtttgaattctctgcccaaattacaataatttatgcaactagaccactggatattcagcctgggaacttagagctagagctaacacatcgaaatggttgaactttctgaatatgattgaaaaatcctgaggtactagatttgattaagactgaaatgtgaatattttcagatttcagtgaccatgactttatgttaaaatgctttaggagaatatcatatacacaaacctaatcttttctatacagacagaaccttaatgacacccaggactattgataatacagaatgtagtgactgatttacttactatgattttgtaagacactttttatgcttcagtagatgcttatctctcatggaacatacagggtgccaggaagaacagattgcaagcaaacagttccttttggctgtaaccacatatatatatattttttatgttgagaaatgtaaaagaaaaatctaaatgtggtatcatatgggttagtaccacctaccttaaagtgtggaaaaaatatttaaccaagtattaatatatattccgggctatctaaaataaattcgaaacagatttatttgaataattaaaagaaatatgtaaaaagaaatttaatctggtttctggttcaagataatggctggcacaaagacacatgtatgtcctccatctaaggtaacaagtaaatgacaaaaataatgagattttaaaaaagaaagaagactagaaggaaaggagaaagagagggagagagaatgagaggaagccattatattgttagaacaaacatttggtaaaactgagaaactctcagaaagtaaaagccagttgggtctgatttatggagaaattcaaagaagggaagcacaacccaagatgcataagtggttcttactataaaagtcccaaataatttccaaacctaaagtcaacataaagtcctgaagcaggcatcagagtgaccattagggaaatatttaaagaactgcatttcaggagatatgggccagctgggctcctcacttcccctttctgctccaaccttaatgtagaaagagttccagttaaaagaaagaactctgaaaaatgggaattatgtgaggacagaggacttctgtacctataaggcactgaaagagaaagggcaggattggaagtgattttatttcagatatggccagggggaataggaaatacagctctacctaggataagaatataagtttctcaactcttagaacaggtttctcctggggtaagttccaggctgcttgcttgccaatatccatgcatctttaagagaagcgagccaggtaaaacaatcactaaactcacaagttcatagtcagccctctcaaacaaagaaaacagaccccaccagtaatctttgtcatgcaacctggtcctcccattataattctacatcaacagctaaggatggcaggattaactgcagaaaacccagagcagaattttaaaacactaaaaaagaaacaaaacagcattaactgactcaaaaaaaaaatcccacaggtaattcaggaaatataagaaaatgttcttaaaaaacaattttaactagcattttaagagtgaatcaagaaaatattgaacacagacccatacacacacatgcaagtggctatggaaaatatcagtcagggaataagcatatgatcccagaaactaaaattatgaatgtgaaaataaaaagctgaacagatgtgctgaaacatagaaccagagcagagatctagagggcaaaataaaagtcagaaccagaaagaaaagtgaaaaaaaggaaaatatgaggaaaaattaagacatgttgagcataaatgcaagatcccaatatatatctaataaacatcctagaagaggaaacagagacaaagaatggaaataacctaaatacaaaaacaaaacagaaggaagatttcacaactgaagaaagaaaattcttaaaattgaaaaaatggaaagggccaaacatcttagtaaattttcactaattgacagaaaattctaggaacttttagaagggaaaaaaagatacctacaaagaatgaacatcagatctcatgtgcctccttgaattctaaacagaattgagcaaagtctttcttgaaggaaccgtgttttaaacttaaaattctatagccaaccaaactatcaatcaatgttaggctaaaaatgtaaatggcccagaaaatctgatgcctacatatctacatatgaattatccaaaaaaaggcatgtcagatatgagacagtaaggcagtggcaatcacatatgatccagaaggattttttttaactttttgtttaactcgagaaaggatatattagaccctggtggttaatatattcacaatatattcatatatatccataatcctttaaaaaccaggattttaataattatgcttactccttttctgcaagtccagttatgctacctgaatgaatctgaagggaataatatttagtagccataatatagtaattgctttttgaattgatattacgttgttagaaggaatctagaaacaaaatagagaagtattaatttatctactaatgtaagtaatgtaaatattatacaaacaaatattatctactaatgtgagtaatgtaaatattatacaaaccctgtaaatcaaaaatagtaatataaattttaaaaattgaggggtctggccgggcatggtggctcatgcctgtaatgccagcacttcgggaggtcgaggtgggcagatcgctgaggccaagagttctagaccagcctggccaacctggcgataccgcatctccactaaaaatacaaaaattagcctggcatgattgcaggtgcctgtaatcccacctactctgaagcctgaggcaggagaataacttgaacctgggagatggaggctgcagcgagctgagattatgcgcactgcactccagcctgggtgacagagtgagactctgtttcaaaaaaaaaaaaaaaattgagaggtctgtgaaaagggacaatagagaggggacttgtgcaaacactaaatcactcatctttttctgtgagtagccaatagatactatctaaaattggtaactcaagagatatgagtacattctttacacaacaggaaaaacaaaacaaaaaaacattcaaactcattaattctatacaatgggatcaggagatgtaagattattcaagtataaatcatcgcatacagaagaatttaaatgaaagtctcaagaaaaacttttctaagacaacataaaggtacattttcatattaggggcttttgatatataataaatttttaaagaaaatctttgatgcaggaatggatgaatgattttgaatttgtaaaatgactcaaaatctttggttgacaaaaatcctttttgaacgtcctcttctttaggtttaatacaattgctaaataaatacttttcaatggccacaatttaagtgtcagcttatagctgatgatggcatttcatcaaaagtatttattaaatgtttgctttatgcaaaaacctttgtttggtattcagaaaaatgcaaaaatgaataagaagtcatcagatttttaagggtcaagtcagggggataataccaagcacagaagtgactggtcaaggcagagtaagataatggaggtgaagttcacagtatgacgtcttgggaccagggatggtgaacggatgaagaaactgtccatgaaggaagtgggaatttaaaaaggcctaaaagagggaaaggaacagatgcaaacagcctcctagacaatagaaatagtgggtttacactttcagagaagggaaagttgggcattgtttgtaaaacctgtgaccaaaaacctgttttaagtttaagatagccacaaggagaactgggaggccacatattccttttttccttgttaataacacaccttttccactgaaaaagtattttccagtgtgggcgaaaaattatatgattactataaaacaaggatagtcagataattgggagtcattttatgaagggatttatgccatgtttgtacttcatttgctagggattcgagtatatttaacctttttgagcatgaatatgttctcagtaccattatattttgggaaatttctctgccagtggagagtctgaagagttgcaggggatgtggataagaaaaaataaaataacaagtttgttgaggaaatccaggcaagaaatattgggggtttgacatgtggcggtggaagtggaaaggagaggactcatttcaagttgaattgggaacagaagacaatggaaaatgagatgtttgcagtttatggcatgtgattgtgcttgtaatgtgcaaccttctttggggctgctacaaggtttctacccaattggacttcaaggaagagtcatagctttctctctggtctggactaaaagagcaaaccagtttttaaatggctaatgactgcatctagacaagtatggagaagaatatttgggctcaaaatagtgaaaattgggtaaaaatcaatttgtgtggataaaagcaaaagtaaagatacacagcatgagtatctggtagattatgattttgagtaaacaaatctgctaaataatgtggaaatgaattttgatagttgaaataaaaggcacattcattagaaataaaagccaaattatttgtaaatgatgcatccaatttaaatatataatcagtttattatataaatttgaaagttaaatggattttatattacaatgtgcttgggcaaattttagagtaatctttatttttactatttgtcatggtcatgaccaaattcactaaatatttttttctttaccacaactcagttttgtgtaattttgagtgccttgcatataaaatcagaattagtcaattttcaattattctgttgtttttctttaaaatcattttttaaagtaatatattgagtccataaggtaatccgcagggttctgtattttggcagtgttttgaatcctgttaacagggactagttttcaaccaatcaaatagcatccacactaattgtaggtttttgtgggattttagaagaggaattaaggttaccattttgaaaaaaaaaatagttcaaaaattgcaatcagttgaatgttttcacttggaattttagactctctatgttatttgttcagtcaagtgtatcttgggaaaaataccaagaaatgtattttcttttgtctgttggcttaaatcctatagaatacagcttcctctataacctttttgaatatacactaagactcaaattacacacacgtatgtacttatagcttctgcagaagatttcatgttctcagataagattaaatgtcatatgtttctcctggcagctgctttctctaaaatcctcatctactcaaattgaattgaattgaaaatagtattggtagatagtgagcctgtcataaacccttaaagtgtttacatcagcaggcagcttatcactgtagtgctgtcctttcttcaacaaaacattttccccatgctaaaatgtccaatcaaatggcaatttatcgaacacttggttacactgcctatttattgttaagaactgacaataaaaagcacgaaataattacattcgaaatacaaaagaagaatatgtatagaagatggcaagaagactggcaatgagtagagggagtcactaccataggattataacgtacatgtctccaaagaaggccgtcaaattacctgtttccacctctcttattattttatatattttttatgtatagcgcaggcatagattggtgattgctaatgatatgtcctcattttatatcttcccctcccctgcactctgggaaaccacattgctttgaatctttttgtttctttgtcttctttatctcatcttccttctgttcaagttgccccattttggactttctcccaggcactattcccttgacattctcatcattcacatatctcctgctagaaaagctgcattcgtgctttcctcactgctttcttaatctctgcccttttacgtgttcaaaaatgtgaactaaaacaatccaaaactgggatcagaaagcaatccaaaacccaaattgtgaaattaagctatctaaaaccccaaatgtatcatgtttaaaatggtcactattcattgaatgtttcctatcatgccaaatcatgttatttatatttaaaccattttcttttctctaaacttctttttagaataataaaaccttctttttagaagtttagagaaaagaagttaaacttctttttagacttctcttcttttttcccctgtttagactctgtcaacaaattacagtgtttgtttgaaatttctcctagatctatgtttttccttctcatttccaaggtcaaatctccttttgtccataggtctcaggcttaaaacctaccttatgtttctctgttatgctcagtgtctattttatttcctcctttctatgtcaacattatctttgtctttcagagatccagacttggaagttgacaccgacttctcttctttttaccctgtttagactctgtcaacaaattatagtgtttgtttgaaatttctcctagatctatttttttccttctcacttccaaggtcaaatctctagtccacatctgggtggaatctgtttaattttaagatgcttattttagaaaaaaattgctagctacataagcactgatcactgtactcgaaagtgacttccagatttttgccataaagttcttgcacaacacttcttctttgtcacttcttttagatgagatcaggcacgttcagggtggtatggccgtagactgccacttcttttatagttactcaatcagtccatttttgttttaacaccgtcattctgctgaatactaacagcactgtttgagccagaagtggcctgccatcgtggagcttgaattctgtagaagagacttttttaaagggataatttagttactcagtaaaaattgctatgtgtactctcagtggtgctattaagggttcttaaagtaaaattaattcctattgactattagctcaaatccaaactttccaaactttattaataccactttcattttgttataccactcttcatttcagtgaaaccaattttcttatgaaatcaactaatccatgaaatcttccctattaatacaagttctaaacacatatgtgctctatctggatgtccattattttacatttccagatttgtgttctgtgttgttcttcagttatttatgcaactatggttgtatttccattcagcgattcctcaggaagagatcatcataattcttgtgcattcttcccaactctcacttcttgccagccccacaatccaagtgctttgcaactagttttcaagtacaaggtttttgttgaaattgataaaaagaaaagaaaaagggataaacatttttaagccaattctgagttaatgtgttctaaaaagtgagttaaagttaaaagtaaaggaaatgattggcctggtagacaagaaattgagattcttttctcattaacatatctgtggacttgattaaggaagttatcttctctgaatcttgtcctcttacctcaagtaagatgagaacttgactaggtagtctctaagggtctgtttaattctaagatgctcttattttagaaaaaaaaatgccagctacataagaaatggtcaactactcagaggcatgacctaatttttaagcaaatgcacatgaagattattatgcatattcagtgagagatgcaaattaatgcaggaagcattttagaagataaatatacttaaggtggattattggtctcataaaccttaatcaattgcattcacatcaacatagcatgatacaaacgtatgatccagaatccgaattacttttcccaagagccctatggggtatctattgataaccatatgtttatgttttatgagctatcttaggcagaaagagaaaaaggatgcccagtactcagtactttacattaatttataaatttcttgctctctatttgcaaaaataaaagtatagcccacagcagatacctctcagtatatcagattttgctagttgaacattacctaacttttctgtggcacattctactcatcattacttcttgtttgtcattcaaaatgtttttcctcttatggaaatacataagccacaagctggaagactgatgtgaccccagaaaagttattgtgtaaagtaatctcttattagaaactcattttttatttcgcttcacattagcgagttccttatcctcttctaccacgttttcctcatactgccagttaatgtagtatcataaattgctctgcctcaatggctaaaaaagagggaaggacattgtgtctactaagcagtcctgtcatgacaaattgtaaagtgttggtgacaagaaccagttaagttcccttttatgtctttttctcttgactcttcctatggaacctaagaaaaagccaacactttaaagtacttttgtaattgggaacaagaaaagctgtaattttcttaaaaataaattcatgatagtttaagacttaattcaaatatggaaaccatataggtgacgagttctcttcctttggttgaaaatcctatggggcaatctatctaaaataattatttcccttagacttgaaaccttcaaaagcaggtgcttttctccagaatcttaattccccaaactcttatgccattatccaggagctctatgaagatattagtgcaagttgaaataagttttgattattttgaaaaataaaggccatattcacaacacacataatattttatataatcaattttaactgatcacaatgtgtgatagttacaaactttacactgtttaacataacaacttgagcaattaaatcacattcagtttaattgcatggaggcagcatggtatagtgtttataagcatggatgtagagactggatgcttgacacaaattgtggtttgggcatgtactaagtgacgtggcatatattcccactctaagcctcagctcgtgtctgtaaaatggggataaaaacaatgctcagcacacaggattggtttgagtattgactaagactcctgcttcttcttactcgtttgttggtaagtgagatgacgagtcttcatttgccatactgaccaacctaaatccctttggcattctctaaactctgctgtccctacttttttgctgatgcatttggtcacttgagaaatgttaagtttatattcttgttatgtaaatctgcagtaactatagtacctataagcattgtactcttctggtgtaaaactggccctaaacagacacaaaatgtttcatattttcatgtgatttaatggaattgagcccaattatttaatatcaattactaaattgttttgtatttaaagtaaaattatttttatgaccgtaatatgactaagtagaaagagatatgttataacatgatttgtttataagacttttttttctattctccacactctaataacatagtctgtcaagaaatctttaaatatgtgtttttttaaaagaattcatatatttgcagtatttgattaaaaagcataaacaatttattttctggagcaaaacaaccatagttgaaattaactttgagatatcttaaatatcttagataaagtaagatatatacaagtaacagtattttctatttggtccacttatactatgaattcctaaatcatggcttatttctcaaattgcctcccatgttctctttcttagaatattacactaatttaaagtggtgccatgtaatcaggtattataccaaagggctctctttcttgctgctatcctactggaagcatactttctgtcaggaaatcatagatgcttgcttagtttaatttcatgcaatagcagcatgcttctttctgatttctgttggccaaatatttattttgagtcatttaaaattctgaaaaaaaataccttctgcttctatttgaaaccattccaacatcaactgcagttgtatttgggtctcagttctccataagaggtcttaacagatgatcccacaaattctttttcagttctacagaggaacaatgttcagggtttcctaggatagggttgctagacttattaaatagaaatgcagatgttatgttaaattttaatttcagataaacaatggataattattttgtgtaaatgtgtcatacaaagtggcatcctaaaatataattatctgaaattaaaatgtaactggatgtcctgtattttatccagcaactgtattctaggttgatgagagtagattgataagatgaatcataaacaacaaacaaaaagttggaatactgaaatacttgctataagaatttaataaaattctacaaatacatttaaggcataaaaacattaatcatacaaatattgcttaaattagaataaaatatataaagtagaccagtgttccttgaatagatggcataaaattcaacagtaaatagttgtgttaagcagaataagggcctcccaaagatgtgaacattctaatcaccagaacctgtgaatataatatattaaatgtcaaaaaggaattaaagtaatagatggaatcaaggctgctaatcaactgaccttaaaataaggaggttatcctaaattatccggttgtgtctcagatatggaagagggaggcagaagagtcagtagtgcgacctgagaaagactcaacttgtcattgctggctttgaagatggaaggggccatgagccaaggaatgcagaaaacagcctctaaaagatgaaaaaggtgagaacacaggttccgctctaaggcctccaaaagcaatgcaatcttgctgctaatttgattttagccaagtgagacccatttggagccaagttttgactccaaaactgcagggcagtgactttgtgttgttttaggctgctgagtttctggtaattttgttataacagcaataggaaacttatacagtaagtaaatactgtgtacattattgatttagatgactttttgtataattttctactgtttttagacatgacatacaatcccttaagattatcttataataataatgatgattttaaaaatgtgtttaatcttaaacatttttcaaaggatatgaatgtacaatttgaaacatggcatattaagctgatatactatgcattaagcatcctaattcacatttgatcatgtgtatagtaaatgaagatatataactttgaagaaaatttgcaaaccaatttcaattatgatatatgatgaaattaagatatagccattgcaaaaacaaaagaacaaaatccaaaatacaagtcaaatgaaagttgtatattttacataccccccaacacacacatttatatcagatactcgtgtgataaatatgggagaccttcatataataattttaaagaaacaaatagattataaggattgcaatatgtaattataataatttagtaagtgtactattgctagtacaatacaagttgagtttgctagctcatttttaaactctagaaataaattcctatcaaacattcaatgtaatactaaaaaattcttagaatttggttgatacagaaatattaacccctccaaataatatttagaattttaattagtacaatgagaatggtaatgaacaatgcctagagatatacatttttatctaaaatgtattatctaaatatatattcttattcatctctatatacagtttttatttaattttataagcattgatattttcttgggtgtaaaatgttttaaagtcatattcaaagttcctcttgccgtgtgttatcttcctgtattcctgatcttatatagttttgcattctctgtcctcaaggtgttgagtaaaagcttagagaaagagaagaatacacatgctaatgcatactttgaccacagttatacaaagatcatttcataaatattcacccatttttctgatagtaaaacagtttcatggaatttgtgagttgtaaaacagggatttaaatgcaagtttggttttgaagcctaatgtctccaaagtccaaattgtttaagccatacccactgcttcattttaagcattcactacagctttattgaactaggctcctataaaaccacatagaaattggatgcatcgtccttcacatggagtaatatcagatttcttgttggtatcccaattgcaagtcaatgagagaaacaaaaacagatggaccacaactccagcatctgcggacttgctggggctatttaagtcactaaatgctcatctccataggcactgggatacttattttcctcatctctgtgtttcctgtacccagcactgtgcttgacaatataataggtaagcaggacattttatttgaagaaatgaacaaatgcatgattgcacaaatgaggctgactctgttctctctactttgtttctttttagaacctgatgattaaaattttgttcttgaaacacctaaaaagaactccgataaaaagctacatgtaggcagttttcatttatgaagagagagtaattcagtgtttggtagtatacacctctgattataatcaatttggaatcagtatttaatctatttaggctgatggagaattaatatagacaaacaggtctctaagtcctccttctcttactacccatgttctcagtatttctaatctctctttatttcataacctaaaaaacaggtttcacttgacttcagtcctacttacctaagtataaaagtaaggagagaggtgataatgaagggaaatgtatgctgtgtcaacatgatgataacagacagtagagcaaccggaagtggaaaataagctgacattgtgctgatggtgttagccaagactggaaagtggctatgtatacaagtttcttccagttgcatagtgcagatttgctagtgcccactgaacttcctaagaagtcctggtttaagaaatatactaacattaggtagagccagtgatggaaatgaaagctatctagtttaactatcctgagtttcaccagcctttggtgaaatatccgtgtagtgtttgctgtttttatcactacacatgcttgtcctgggattcttaaaaaaaaaatacccgaagggtcaggtaagaagaccacacacattcattctaaacaatatgatcttactgcaggttttaaagcatatggattttagaaattgtttccatgactctttttttttaaaaacaagagctttatttcttaattgacagactttggtacaacatattagaccaatttttaaagacttatttttaaaagcctacagagaaaataattccattgtctgaaacatacaggtatccagaaaagtggtaatgataggaaaactctaggctttttatagttgacattttgaaacaaaaggatatattggctctgccatttgtagcttttggtgttgtggtccatgaaaataatggtctgtcttcaatctatcaagtcacagacaatgagctataatctggcttttgttggtgtctgaattttttcctgcctaagagatggccccagtaacagcacctatttccagggcagttcccttcctgatggaataaagacattttggagtggaataaactccagcaggtgtagcaattccaagtcattcatctcagcactattcccaaatctttccattcaaccttatatgcatggtttggatggtcaggataaacattttcttattctttgattttgcttttgaaggagtgctgaggcagcctggaaatgtccaaagcctcttatacctgtgtttcagctgtagattatgatgtctgtggagtttgtatcccaagctgggggcatcaggcagagtcacagcctaggatttggagcacatactggatggttccgttttataccacagagggattgatggtgtgagcaataacggggaggccacaagaggctgcagcaccatttgttgagaggtcaggtgtcgagagtgtggctcagactggcatacggcaccttgttaaccatgttctcctaccaggaaatatgggatctcatttgaatcagactatcagggaataatatggaggtctgttctgagcctatagggaatctgcacaaagtagccaccagcacagttaataatgggattgcctgggaactctctctttccagccatagctgaatataccagttgatcaggtcaatcttattctctaacttcctctggggaggtatacagtgagtctggggaggtatacacaatggccaattttcatcctctctgctgggggagaagggaaacagatctgaattgctatgtttctctcctccaatactggttattaatctataagcagaaaatgcctttcttaactttttgtttccatagagttatcaagatccttaattttgagactcagcttcctacaccggctaattctctgccttttcaggacttaaaagtttgttttaactcagttttctatgtgttcaactttcctttagatccaaccccacatatgattttgcaactaatttattttacttttattttttctttggcctttttggcattcttatgaactttataactcacagccaaactctagagatttcccattggatctctcatcactttaacacttagagttttaccaaattggctgaagaattatttccagcagtaaccatacatattttctcgacagttttctaaatttacattggtgcatgccttggcctttgtgccacatttaaattcccacttttcctagtacttgttctgattaacacactgttaacacagtcattcattgaagcacatgctcttcatctccttggtggtaactttcctctggtaactagccttatgataacttgccttcaatggaataaaagacataacccatagagtcaccctcatcacaattggccttggagggaagaatgatttgaaaaccacaagaggtatataaaattgccatgttgtctatagatttgttgaggatgtttttattctaaaattctcaaggagatgtattgctgagatgatataattcaaattaactttccttcagtcatgtcaaagttcattatatttatgacttactcaggctcagcagctgttggaatttgatataggtgtaaaccagaagtggtgggtgatcataccatagcagaccataataaacagcacagccctgaaattttcactgagcttcgtcttagtgagtctcccaactacgtgaagaccatgggatagctgctactggcagtactgatctccctacaacccactacctgcttatagatatctccatagagaaaaagaaaaggcagacttctcaatatgtagatgagtatgaattgtaagaatatcttcagatggcttcttacctgtctgcttcaccaacacactttgaccatgactatgtaagagccaggtttggaggatgtggcgctaatgagtccaaggccactgattaaatctccatgtagctctattgcaagccctcaagctagttatctctaaagacttacttctaattttggtcaaaatatttcacaaatatgtgccaatgtcacatggagggcagtgaaggaatatgtgcagagtacagtgtcagcactgagagagctcttaaaagacactgagtccaattactcactaaaaagtgatgctaaccaatgcatcagttcagatgatgcctaaatgcctccagtaactagaagctctttatcttccaagctaatgtataacatagttggccataaaaaattctaaccctcttccacgtggcaatcaatcaattctttacatatttgagggtagccaccatggttctttgaaatttattttcactttaaacatgcttatttccttcaaaagtccttcagatattctggttttttccattttaaatgttcaataaatccctcttgaaatctttgacaagaatgaagcagagtatgccaagagatattggactagcacaggtcagttctctcagggaactagattagatagatctcttaatgaatactacgatcacatcacatcatcttttatttggaagccatatcaactcttaaatcatattgagttcattttttttttttttttgctaaaacctatgtgtctttaaagtgtacttctgctgagccatggatagtgtccagtgtcatttgtatacttttttaaagctcataaaatattgctgtattatttagggaagaacttagaagagtcttctttctgccaaaagaaatgtgcagctatagattaaaagcatgccgcaactttgtgatcatgttgggaatacctcattcatatccttcccagagggaactcagtattgctacaggtgcatgtcatctggacttgcagacaattttacctttctttctaatagacatcatgtgtgcatgtgtgtgtatgtgcttaaagcttcctcttctggtattgccggaatgacaacaatgggaataattgtcctatttttcagatcttatttgcatctatgaagttctatttctcacctgttatcatcacaattttattttatttattacctatgtcctatgtgtagaggtgtctgaggtcatttaggacttttcctgcccatttctccaatattttctcctaaatgtctaggtatcatgatgaactgtgcaatcagatggtcctgatttcaaattttatctctatcatttgctagctctgagaattttagcaagatttaaatcaattaagcctcattttaaaaaatctgtgtaattggaggtgataattacctacctcaaagggatactggggcattgaatcagataccttcaagtgcctgggatatagtaatcattcactgatttgtaataatacttttattattactttgttttaatgtgctttctacagtgtatttgtcttcataatgtgctcaatttgtaatttatttcacaactgaatgtgggcttttattcatcactcctctccacgttcaatttatttatgtgcgtatcagccattacctggacaaatatatagtttctgaatctcaaaaataatgacctttattgcctcaagtgtctgtctttctggtgtcataagccacatcccagaagtcaaaattccactatgtgatattagctatgaagccaaccattctcttgcagcaataacctacctatttcgatattttaaccatattgaaaatttaacactttttggaagaaaaaggtgttaaaaatgtttatcctaaaatattcacttttctgcccctgtcttcagagttccaatatgcttttcaaatttattctgggcatcatttgtccctcttgctcccaggaataattaggaaacagtagcaattagcaaatgtaagtgactgcatccaagtatatgttatggagagacaacctttttgtaaatcacctgggtcagatctgtgtagaaccactcctggtgatgccctccatttataattacgttggtacttgcaaacacagttgctgtctgacatggatctactaacagtactgatttatgaagtgtgacagagcttcatatattttatgccattctaggattgaaaagttcctctaaactcttccttatatacgtcattcattcttcaaaacacatgctagattatttatttgagaggcaacccagttttcctaactaatttacctttcaactcttattagatggctgtgcttgacaattataagtataaatgtttggaaggatcatttataacacatttattgcttctgctgaaataagcttttctctaaatattactgaaaaatacaacaaataattttactgcactaaaacaaatctcattcatttattgttgccatggttggaatgtttgtcacctccaaaactcatgttgagatttaattgccaaagtaacagtattgggatgtggggcctcatgggaggtgtttaggtcatgaggttccatcctcatgaatggaggaatatcatttttaaatgggcttttaggaatgggctctctcttttgtcattctactttctaccatgtgatgacacagcaagagggcctttacaagataacagctctttgatcttggatttttcagccccccagaactgtgagaaatcaatgtgtgtttgcgtgtgtgtgtgtgtgtgtgccagtgtgtgtgtgttttgataaattacccagtctgtggtattctattatagcaacacaaaacaaactgagataataatatacaaaaatataatatacaaaggtataaaaatgtaatttaggccagaagctgaagttggaggtgtagattacttcttcaatcataattaatgaatactctatgatgagggtttattgaacatcttcacttgttgacgttctatacttgtcctgccagtgcaggtacttactcattactttgagtaaaacagtggaaacatagagggtttcgaaatgaacagaggggatggggagagagagaacccagaccccagagatgattggactaatagaaatggagttgttgttgaacagactgaagtcatggaaaacttgggggagggccatacagggaattagggttgaagatgaggtgttagggggtatttagggccaagttgctctaaaagaatagacaagctcgaaaaagaaggaattgttaataagagcagatgttccattcaggccctgggctgcggaccttcatcaaagggaagttgatactttaatgttgccaatagtgaaaggcaaatacaaattagatttcagagaaagagaagacttcaggagtttagacagaaaaaagtaccagtaaagaatcaattattaaagctctactttttgcaatttggcaatatggataaattcacccaaagaaattataatttattacaggtcatagttatgctaataacaaactctaattgattgtagatgagaaaaatgatatatttgtagccaatatttgttaagtaattactaagtgccagacactgctgttcatgacacaagttcatcctcacactgacaccataagacgtgctatttttattcaattttataaatgagatagataaattgacatctccagaaaggaggtgatttgcctgaggtcacaaagataggtgagtgacagagctgggatttgaagacatgctgtctggcttctgacatcatttctttatcagaaagcatattgccacaagaaaattacttgcggaaagtaaaagtaggaggaccacttatttggctgtaggtgatttggaaggcttcattgagagcctctttagattgccacaagaaagcatattgccacgagaaaattacttgcggaaagtaaaagtaggaggaccacttatttggctgtaggtgatttggaaggcttcattgagagcctctttagatatgccctctccttgcatatctgtgacatattttgtatgccctgcctatgtaatttactgcattttattttacatatcagtttgcatctgtgtcttcacccctagattgttatttccttgaagggaagagttgcctttcagttacatacatatcctgttgcctagcagaggaagcacagagagaggttgaagaaatgtttctttttttctttttcttttttttttcttttgagacagagtcttactctgttgcccaggctagagtgcactggtgtgatctcagctctcggcaacctttgtttcctgggctcaagtgattctcgtgcttcagcctctcaagtagctggggttacaggtgcgcaccaccatgcctggctattattgtatttttagtggggaaagggttttaccatgttggccagactggtctcaaactcctgacctcaagtgatctgcccgcctgggcctctcaaggtgctggggaggaaatgtttattgaataaattattgaggcttaaatgatgagtataattttcagaggtgggaaggggttttctgggaaagaatagtcccttctggaagtttgcagtcagaataggcagtagatctaatgtccacatcgtgaaggtaagagttttgtagggagtacatttgaaagaagcatcataaagtcatgtagggaaaacctaaatgctcactgatggatgagtggataaacaaaatgtgacatatatatgtgtgtgtgtgtagatacacgtatgtctacacacacacacacaatcatacgtgtgtatacacatatacgcagtggaattttatccagccttaaaaaagaagaaaagcctgccatttgcaacaatgttagatgaacctggaggatactatgctaagtgaaataagccagacacagaaagacaaatactgtatgatctcacttatatgtggaatagaaaatagtcagactgaaagaagcagagagtagcatggtggttgacaggggctaggaggaggagaggaatggggagacagggcaaaagatgcgaagtttcagttatgcaagataagttcttgacccctaatgtacagcatggtgaatatagttagcaacacctattatatacttgaaattttctaagagcgtagatcttaagtgttctcaccacaggaataaaaaagagaaaatattaaatatgttaggtgatggatatgttaattagctaaattgcggtgatcatttcaaaacgtatatctatatcaagatgtcaagttttacaccttgaatatatgcagtttttatttgacaattatacttcaacaagctgttcttaaaaagcagattaaaacttctaaaaattatataaagcggggcaggagacatctagaaagggcagactggacctaaggtttgtttacctcaattttccttgttaggactttatttaccttcaactatgtacaggtaaaagtagtttgcagagcaattgctcctttcttgctccatttagtttggggaacctcagttcttgtcctagattctgaggagttctctggccaccacttgtctgaattagccttcattgagtaaggaccatttttagattggggatgtgtaaatgggggcaaaacacttatgaatttatacattctgtaagaaatccatggaaagagctaaagtctgtctattcgagaagatacttaaggtattaacttggggccattctaattagtgttcatgttaattagtggttagatttattataagcctacagaattaagacactaaagtaaatttgggtgttgcaagaaggaacgcagaactgttgtggtttttatatgtctataagtctgcttatacaccaaatccattttagtcctagtgaaggtttgcttgcatccgtcaatatgtagcctaattggtgacaagaattgcttcttctgttcactattccactttgaacacttgaaactgaagaatgactccaactgtgcaattgaagccctccatttttccttcttggaatgaaaaacctctataacttggctccactaccagttattcatgcttgttaacttgtgattttgatattttgtattatagttagtaataaaaatttagttatttggaaattagtgggcaagaagctcttttccagagcactgttgtaaaatttggggcacccaatcatgattatcctgtgtaaacactggtaaatatgttactggaaaaaatattcaggggcaatcaattaatgtcatatattcatttatttttatcaccagcatatgtgattttagcagaaaaattgaaaaataactggtgcattgattgattaaagatgtaatttttaaaaacttttattttgggttcaggggcacatgtgcaggtttgttatataggtaaattgtgtgtcatgggggtttggtagacagattatttcaccactcaggtaataggcatagtacccagtagataggttttaagttctcattttatatgtctattgatacataaaaaattaaaagtcatcagcaaagtcatcagtacactggcaccatacatacacattatcaccataaatgtagaaaataggaaataaataaatcagtagaaaaagtccatgttttcaaggaaggacattttgacttataataacagatgaaacactgaattaatatgagaataggaaactaatagtgaattttaaaatgttttcttttacatttaataaggggctgtatcttgttaaaatgtaatatgcacatcttgactagtcagtcattataaaacatttgataattataaagacatatgattctgtgaaaatagagtgtctgtaaatcacgtgtacatttccaaaatggcttttgaaagtgtctcacccagatattatcaaaccaaactccatgagaaaaatgagatgggcaataaaaaggaaaatattagtgaagatagactgttagtgaaggggtaacagaacaacccctaattctcagtggctcgtaagaacagaagttattttttgtttgttttaattcatgcaaagactgcggtgaattaggagaccttccagagccacatccttcatgtgatcaatgggcaatgagaaatgcttccatctggaaggtgaaagcagagagctagagaatcaaacagtggctcttgaatgcctcagcccgtaagtgatagatgccacttctgctcagatgtcactggtgtgacctagctacacaactcccctgtctacatgagacctggggaaggagggcctaatacacactgctatttggtgagtggcaactatctctgtcatggatgttaactttataagaattttttaatgtacagactattttaaaattttactatataatgcatatttctgaagtacacattaagctaaaagattttaaacctttttttgtaaatatgccagatttatgaataaagtaccacaatatctgctaacaacagatttgctaacaacaatgaaacaattgctaacaacaatgaaaaaaaggcttgccagattttcctagccttctagtcctgtgctcatgtcaatatttgataatcccaaactaatcctcataaaatataagtaatttggatcttctgctttcgaaagtttggtttatgaaagaaatactagtctaattagttacagaaacagtctcatgtctgatcaggcttttccagagatacaactcatattcatcttatatttgtgtactctggcatgactgccttctccatcttgtccctctctttgctgtacttttgctttttattttattttattttaatcatgtgagcctcattcccccagatccagatatgctgctgcttgatgacaggagaagatgaaggctagcaatcccagatcatttcctcctgtttcagtgactctagtaggaagataaatactgtctccattcctggaaatcactttggttgatcttgtttgagtctcattccctagcagtgaaccaatcccacttgccataggaatgaggtcctcatgaaaggcttgagactcatgatcattcctgtgctgacatccaggaagagtctttgcttaacagcaccactggaaccagctggaatatggagcacaggactgttcccatagaaacagaaaggtcccttcaacctatgtctgtggatcatgtttaataattatgtctactcttttaactctgagtccatattggacaccccaaattatgtattataaagtacacatccagtcagcagcatttttatgcctctaatttttaaaatgttttaaataaccattaaggtggaattaaaagcattctcaagtcatttaccaagaataaatcataaggaataagaaccagaagctctagtttgtactatataattgttttaaaacaccaggtatctgcagagttttactgaaacaatctcagtacataaaccaatgttttcctcttctgtaaatattttagcaaactttcttttgaagtcaaatgcaaatattcatatttttctctaaaattagtatatttttgtatatagcagacacttttgtggattagagggagaactaagcaatcggatctatctgtaacactttaagcaggtagatttggaaacttctttctcccctcctcctgtaaacagatcttagagggaggcttctaaactacatttgttttgattgtgctgcccttgcatacctctcaaacatgccaccatatatgtgggtacttagcttgtcactgtagagatggtgtaacattaaaggacaggtagctgtttgtcattttcttccattctcaagtgatcactaaattacaagtctttttttcttttttatgtttcattcttagaatgaacatttctagcctttgcatcccaaacatttaaagacaacctcacttagccttataatgacaggttcttctccattaggaccaaaagtttatatctaatcccaacaggtcatatggtaactgtaatcaatccaaccttgctgctggtttttgctctaaaaaagtaaatcatatcaagttatcaagccctgcaaacattctatgagcacctgtatctaccaggcattgatcatttctgtaataggcaccctgccactacacccaggtccttctggctgattaaaatctgtactgctgacagttggcctgcccagacctgccccgactcttcctggaccccattgacactcattctcccttcttgtagcagccttcattgatagttatactgtcagacaccaactgccaccctgcctgaacctgctctctgacttgagatttggatctcttgaagagttagctaagtctctagaacttgtccggcctgattcaaagttttcccaaatccccaatgacaagtatttgctcttatttaatgttgtttactcactgttgtttctaagaaatattatctctgccactgttgctgacctgtcagccttctcccttttcttctattgtcttttcctctttcttcttcactgactgccactttgccagtgcttctaaggcttcacatggttaaccagtctcagtgcaggtatcttttggagtcttggttcttctcagctgggatcatatgagtagtctgatatgtgatgaacacatttgtttccccttccaactattttttgtttgaaaattcagaaaatgtgatggttgaaaaaatcaactgaaaagttgatttttgggtagccaatgttcaatgtgcctccataatgaagccctgctcctttgactatcctttgccttttaaaaaatcattttccacttctgtacttaatttttaaaaatctgtagaatggaagtattagcatttacttttgtaactagttctgctgtaaaacgtaagtaattcatgcagaagttttggaaatacactcataaaatacatgatatgagtatgaagtcttaccataattcaaataagtacatttattattgtatgtaagcagcattttagaaagcactaaaaaattataagaataaaggactgttctaaaatagtttataaagggtcagaaaaaataaacatgtgatttgataaacaaagactaagggagagcataacaaatagcaaatagcttaatggtctacaaaataagcaaacattcatactatgttaatttgacattattcaattaaaaagtcaaacccccttttggttgatacattacctcctaatgtatatcataatgcattaaaagctatgtaaggaaaacctctatagatgactaacagaagctgagcctctgctgtataataattggtcacacttattcacatttattactacatgccaaacaccgtgctgagtattttttacatattaaacttactgaatattttaactgaatatttttcatgcattgttttccttcctactgttcttttccaaacatattgttctgatctctgatctttcctctaagtaccagaggtagagcttagtcctctgaggaagaatgctgccaactgtgccagttcttatggggaggtacatgaaaccctttaggaggatgacaggaattgaagaccagaagcaaaagttgctgttgggttaagggttgttgctgggactctggaagggaaaaatcccttctctcctcctgtcttccatctccctctagcaccttctattcgaagaacaaagcagaaatccaactaacaagaagaaacctgcagatggaacttacaaaagtggaatttatatagagagtagaatggtggttaccagaggttgagggggcaggggagagaggacaggaaaaggggaaatgttgatgaaagggcacaaaatttcagtaagacaggaggactaggttctggtgttctattgtacagcaaggtgactatagttaataagaatgtattgtacatttcaaaatggctgaaagagtggactttaaatgtcttcatcataaagaaatcataagtacttgaggtgataaatatgttaattagcctgatttgatctttctacgtatatatgtatatacgcacatatcaaaacatcacgccccataaatatatacaattgttgtttttagttttatttttaattaacaaagtaattgtatatatagaatacagtgttattaactataattaccttgctgtgcagtaaatcactagaacttatgtctccaatctaattgaccaacatttcctttttccccatccacccacctccccccagcctctggtaaccaccattctactctctacttctatgagttctttagattgtcttctatgacgtttttaaattccacgcataagtgagatcagatgatatttttctctctgtgcctggctcatttaacttaacatatctcccagctcatccatgttgtcacaaataacagacattcccttttttttaaaggccgaatagtatttcactgtgtagaaatactcaaatggaaacaacacttaggttgactattgtgaataatgctttaatgaacacgggagtgcagacatcccttcatcataccgatgtcattttctttgggtctatacctagtagtaagattgttggatcatacgataattctagtttttttttttttggaggaacctctatactattttccaaaatggttttactaatttacaatatcaccaacagtgagtatagaagggtttccttttctacacatccttgccaacatttaagctctttcatcttttgataatagctaatctaacaggtagaaggtgacatctcattgtggtttgttaattaaaaataaaatagaaccttaagaaaataaaaaaaaaaatgtagtttgcagacactcttcccccagcaccacaaacagagtatatagaagagtggatttggagagattcaaatttggagaggtttgttgagagacaacaacttcataaacggaaaagataataaatatgaattctgagtaaatctctcatagattctcccaaatttcacatctgttctcccaggaatttttaaaaaatgttacatatctagtaacaaaataaatatgcatttgtattcttgtcatgatattttattttatgccaacaataaatgtagaagagattcactataggtcaataactttgatttcatctaattaacaagttaccttcatcagttaatgcaagataaatacgtaatttatgacccataatcaaatttcacataatgaaagtcctaatttgacacattagctacattatgtccattagagcttgtcttttacaggtactgccaatgaagcttgaatatattggtaaagcacagggcagaagtaaggtggaaaaagtgaagaagtaaattatgctataaaatatttaccatcaactgccagctcattaatcagacaaaagcaatagagacagccaacagtacatgtccccccacttttctggagacttactgcctcctgtgtgagtgagtgttttctgtagagccgttttcagttgtctatgatggtatgccagcaaggggcttcccatgctatggtctattaaaatggtaccctggaaaccaggtactcttgcagaaagcagaatcttctgaggcccccactaatggtcatgggtcaaaggctaatacccttgcttttatggtcctgagaaagagcttatgcctctctttggcccttaatactatcttcctttacttgatcccacacagtttatcatgcatgagcagtcaagatgtttcttttttcctttctttataagaaacagttttctaggtacaaatatacatcagaacaattgagtttcttaaagtacttgcagcttcaatatgcaaagctgtccctccgtatacacagctctcctatgtcttttggtaatttccaagaatttttatggcttcagaccccacctctcatcatgaaattatctaacccttggagacttgtgtctgagttccttaagtttccagaatccatccttttcttctctaggagatatttcagggtcaagggatttctttgtcttaggcttgattttctagccctcatctaaaaatgtatttctgttgcactccaattattcccttgcactttatgttccattcaagaagcaagaggtccccacctacactctactgacaaatgccctttaatgcttgtctttcatggctgatctactgatgcccatttctccctccgttttataatagggcactctcagcatcataggttactactgcctatcatttaagactcacatttatacatcagtacatacgggtttaacccaacgttgcaatgcagcccttaagttttacatttaccatttacagaaagattgtaatgtattcataggggataaaaaccattccatctagaataattttaagaggttaaaccaattattgggttgttataatgacagaaatggggcaaggacatcaacaggccaaggagaatgtccaggcagggcagttccaactgggaccatctaatattatttcgaatatatctacatacacagccagtcatttgacaagaatagccagtgaatccctctttagaaattagtaacttcaggcagttgcagcttaaaatgccaagttagatgtcagagtgctaatgaaaataccctgaattttggagacagacatacccaggtttgaaggatggccctccatccactgttgttgctcccaagtttcctcatatttaaatagtttttaaggcttttaagaaaattaatgaattggcaaatgtaaagttgaaagcatagtacagtacacattactgtaataattagtagtatttctcatgtgtgcccccatcatctttctgtaatctgctgcatcttttattttggagggatgttggctctctggtactctgcattctatccacacgctgaaattggctcataatcactatgcccaacccttgctatttgtgtatggtattaaatattagcctatttcataccttctcaatgataacattattgcccccaaagggattaaaattggttatttgcacagcagcagcaaaaaaaaaaaaaaaatccaaaactcattctcttattatgaataaagcacagatatgcattcagtacataaagaggtatacagtgcatgtatgctgtttaaatttcacctgtgggggggagattaggaaaataatgtctaaaaaggcttttttgtgaggaacaatgtgagaaatcaattgagaaacactcaagtgatttaactacatcaccccaatttctcctacaaccatcctactagttctgcaactgattagacagggaagaacttgtccaaagccaccgagttattgagtgataatcatagtttaagtgcaactgacctctggatgattttaccttcaaagggagaggttgacaaattagatattctagtaaaaaacgatggcaaaaaacatggttccagtgaacatttcctcgttcagaaaagtctgttagcatctaagtgcaagtgacagatgtgtcttggtttcacagtagtggaactattgaaacctttggctcaaaaaaatctgagaacttctcttctaaaagcacaaatggagccatcaatacttcttgtcatagaagaataaggaagactgagttttagttctacctgtgtcaggaatgtgtgaaatgtcacttaaggtatgtagacctcatttatctaatctataaaatctgcagattctctttcgtttcttccctttccttctttccttccctcctacctccttcctttcttccgtatatccatccttccttccacactgtctccctttcttccttccttcctccctttctctctgtcctttcctttctgcattccttttgtttttagtagcaaaaattatttccaaaataaaatctctctgaaactctaagtgtaaaatagaagaaacagagctcagagagtcagagtcctatttactacccccaccctaacattcatcaagtagctcaggactctggagccctgtggaatccagttagaagaccactgaattcagtcccttcagttttgaagtatttggctttgagcttctactctgaagtagttgtttgaatctaccaacagttactgtgcaaacaattttatcagcatgcacgtatgcctagtgagattggatattttcgttagccaccttgccaacaaatttttctcattacccaaacacacacacatttatgcatatttaaatatgtgcttaagaagcagaaagatatgagttaatggattcattaacaattgtcacatgagtaggctgagctgatctttacacattcgttctcagtataagaatttaaccagatagttgctgtctttacaaacaaaacttttgatacccctaatgatgaggaccagatgaaaaataataatttaaaacttgttactcagcaggcactgtgtattcatatactcccttacccaaactggaaatcccaattagaattctacatttaagttcctgggtagttggtttctactccaagttcagctcaatatcaaaattagaataaaaatgataaaaggccttgagatccttctggatgtgtcacatcttttctgattgctgtactgtcatcattgcagtcttctcagtagcatcccccaattaatggattttagtctacttacctcatttagttctaaaatatttgtgtctttcttattcttgcttgtatttctggtctgactttgccagttaggtaagagcagatttcagcttgctgtgctggctctaacccaactttctcttctaaaattttccattaactgacctctgttttggagcacacacgttttcagatgcctaacttcatgccatgggactgtcatattcttatttttttcctgacctcttagccttggacctggctctgtaccagaactgttgcacagtttgcaaatgcttctattattaataggtcatatccacttgaaagattaaacagttatttaatatgtaagggttgcattttatttgtttaattgatttttaatttaatgtttttggtattataaagtccattaataagagatcttaggaaattattttgctttgaacttaattgaacatattcacgagcagtcatctattttaaccaagtatatagtattttccaatgttcagttttcttcaaagggaatgtattttgtacactcttaggcgttgtattttgtgattttagtaaactaagccagcagagtatcaatgtattttcaagaaaagtgcaatttgaaattctgcatttttaacagtggcagtggctatggcattcaaatgtacaattctatttttgaagacttgaagtgttttgttactttctgtctttgtgtgtgtgtgtaatgtatgcagaaatgtactaggagctctttgaaataaaaagaaaataagtagagtgtcaaagatttacctgtcttcctcaagcattttctaagtgcttgcaatcagttactatgcttcttctctgggctcatattttactgtttttgtttatttaaagagataaaaatataaatgattaacatcaagacttgaatttttggatgtctttatcatgtcatagatgatagggctcctaaagctacctgaaaatcattagaattaagtgtatgactgacaacctgcgtgtggtttgcagacattctctaagattgtttgaaatgatgttttgtttacataatagtaagtagtgtgtgcatctatttgagctaatggtgatattgcaactttaaaaaatggtgacaatttacactacttgcatcagaagagttgttagtgtgtgagaattacagtcatgctgctgtctccctacagactctaaaccaattgcacaattaatatggaggtataaatgaatgagaaaatggtcatcttcattactggtaaatatgtgatggaaagtagagcttggattagagagctgaactctggcttcctaataccccatgcttccccagtggccatgagtgtgattcttgagactcattatcagagagaggaagcagctccgcagagctgtgacttcccctgccagtcatgccagggaagctgctcctcatgacagccttctacagccagctgatcccaaaaacataaacttggcagggctgagttacgcattcctagtgcctttgtctaatcttactgatcagataaattactcccccttccagagggaaccatatagatgtctgggtaaaagacagattagggagaactgcatatagagttggtagttgaaaactctagggtagccattattattccaacttagaaaatgaaaaagcaccctgatagaggtcagggactctgtcaaggtcacagagctagtcactgatggagcaaagcttcacatgttctacttagggaggctgcgttagtcaaaggtagcgcagctgtagacctgtgctattgcatacagctactcattttcttctcacatagtggttgccatagaattttcaacagctcagtcccatcttgtgttaaaatctgttcttccgggaaagatgatcattgctccattagcacatccctattaatcttttggtacatgctactctcttctctgtctgagagaaacttcactcaatttcttcgagccagaaccgcctaagcctcatggtcactgtcctctgctctgcttcttcgctctaactctgccctctctcaccacatgtgagatactctgtgctctgtatctggacagtgaccccagtctctcctgctgttagtcctgctgttgcattttgtaacatagccctgctttcttaaagctggatgctttctaccctctattttccactttgaatagattaagatcaattaagattattaaccataaaaagggaaaggggattccatagtggagcagttttactagatgaaaatgttttatccactctgttctctaataaaaacaaacaaagctcaacaaaacaaagctcaacaaacaaaaattctcaactttatccaacaaaatcaatacacaaacaaactttcccaatgctttcttcccttcgcacatgtgctggtgcccatactgatatgttttacattcaccctaggaaaaataatttaatggacttggagaggctttccaggcaatattcaaatgcatatatcatgtgtcgacttgtgatttctgcttatgttaccattttgattgtctatcacctctgccaaggaaaagaggtccatctgacagaattacttaattttgaaatctatatataaggaatacctatctataaagctatttacatctttatctgttaactcagtgattccaaaataataaaaatacctaagttcaaaatatgggttgaatcttaattcttatgaaaacaattctatttagttaaatgttaccagatagttactgtgacccaactatattaataaagaactggcttgaggtgaattagtaggaacaaagtttcagagacagaaaacctgagatggaggccagctttaacaatcaccctgtgaccatgcccttgtgtaagtcagtaatttcctttctatcttaaagttcttcatgtatatagtgtgaataataacactgtactcattgattgtgttgggattaaattaagataatgtaaaaatcttagtacagttcctagcacataaacagttccttataggccaggtgcagtggctcacacctgtaatcccagcaatttgtgaggctgaggcaggtgaatcacttgagtccaggagtttgagaccagcctgggcaacgtggcgaaaccccgtctctaaaaaagatacaaaaattatccaggcatggtggtgcatgcctatagtcccagctacttgggaggctaaagcaggaggatcatttgagcccaggaggttgcagtaagctgagatcgcaccaccgtactccagcctaggtgacagactgagaccctgcctcaaagaaaaataaaagttattcagaaatgttaattatgtaatcattgaatttttaaggcttgtgggaattgagcataattgatactatgcaatgaaagaagggatggcttttttattattcttctctgaagtccactttcctatttagatactgattcaaacaaataaatgaggaaacaggtcttgtggaaatatatatgatctgtatgaatgattaaaatattctgaaatttattgaaggctagacaggaaacagtgagatcctttccacatccacagattcattattttcttatattgctaaagttatttccaaatattatctcatttattctttcaacagcctttcctattgttaacatggttttacaaacatgacacctgtggctaagaaagataaaataaattggctaaaggttcacagaagctataagaaaagaatcaggagaattcacatggtctttgtttcccattcattgttgtttgtatgaggccccattacttctaacggtatgaaaatttgtaaaatttgttaagttctgtacatttacatttgcatacttataaaatgcaagcactgtaaatttgtgaataatctttttcttaaactgaagttctttgaaaaagcacataaagtttttatgaaaatgtaaatgacaaaaacaatatccatttcattgtagttccctgtaaaatgaagataatagacacactattttaaaacgcttttgtttttgaacatttgtaatagtcctggattaagtttcattaaaataaaagaagatgggctacattgagaaaattgtctagggtctatggagaggaaaatcatgtttctgtgaaatagtatataacttcatgaaagccataagatgctagtaacggttgtagaacagtgcttatttttgaaatttcaagataagccagtttggttggaaacattcaacctcagacatcatggtggatagggtaattatagattcaacaaacttcactgatcacttgaaacattctttccaatggtacatcatatagaaggttttcaattcattttggctattattgacaaaattaccataaaaggagaaagagtataagtttggagttgaatggttcgaaaataatactcacattcaggattctgtaaagaatttactatgccttggacatattacttaacctctttaaattaccttttccaatttttaaaatgggaggctactaggattattctagaattagagatcacctatatgaaaagtctacaatgtagtgtaagctgcataaaagacggtgattgtctgagttttcctgaaagcagaagtctgagacatagacatgcatgcaggcagtttatttgggaggaagaatctgtgaggaaacattgtgactgaaacaggggaggcagcagaggtgtgtaagggtgtgtctagagtccatggggcctccactctcctaagacctctgaaacatggagaccacctcctctatatatccatctgaataataggaggctagaacgtttgtccattggcatagttcttgttctctaaggatctatttcttctaacctaattttaaaagaaatgacacatgcttattaatacccttttttgtcaagatgctgtgattattgattgccaaagctctctaaggctagtctttccactgttaaggcttcaagattttataaacaagatggaaggctttattcagcagaatatgctaccatttttaagagaacagcagttgtcagcatgcagggaatgtgcccttaccaagggcttgtctgaaatgaagaggtggtcatattagagaacttggataagaggagaaagatgaaataaacaagacccaaatgttggtaagggtaatgtattagccagaattctccacagaaacagaaccagtaggccgcagatatagatatgtaagaggagatttagtatgggaatttgcatatgcagttatggaaactgagaagtctcaccatctgctctctgcaagcttgagaaccaggaaagccagtgggcaatggtgtcactcccagttggaggctgaaggcctgaaaactacaggggggttgggagtaactggtctcagagttcaaaggcccaagaaccagaaactctgatgtcttggctctggtgggggagggggaggaatttgttcttcctttgcgtcttggttctatttgggccctcactggattggatgctgtccacctaagttggtgaagacagatcttctttattctgtctactgctttgcatgctcatctcttcaggaaacacactcactcacacaccaagaaataatgttttaccagctatctgggcatcccttaagtctagttaagttaacacataaaagtaattatgacacataactttcagagaaattaaggttgctgtggatgagggtaaaaccttaaagggaaaaagaaaagtctaaagattttttacaagatctttctttgtggtatcctgtataaatctgtaatacgtcttcaaagtcttgtttttctttacacctttcagatttagactactaataccgggtaataaggcgtctttgctttatgtggattatatatgaaatctgtgcacacatagtactttgccaatattcaaatcatcctctatgacaagtactgcatacctcaaggtacttggatttaattctcaaagatgtctccattgtgtgtctttagttcttttaattgtcatgctgtgcatgtagttatgttaatagctgatattgatttgcagttaatgtgcaggactcagggtaatagctatgccaaaagattgcatttgattactacattgtttcaaaaaaaaactttctcataaaatacgtcatttaaatatcagaacggggataagcatttcactgttgcagacattgggactcaaatatgttttgtggcttctctaaatccatgtgcttctttaagtctatactatgtggacagttaaatttagatcttctatttcctagcctaggttttttccactatatacggctgcattgtcatatttgtatgcttgaaattatacactgctttataaattgatattctataatatattaagtatatatttgatatatattagttacccaaagtagaagacatgataacataatttataatattaaatgttttccctacaaatacaataggggcacatgtgtatttgtgacctacactaaaaaattaagatttataaaattcaagatattatcatcattatcatatgcataactgtgcagaatactatagcaaagtcagaagaactaaaaatcttcacctctggaagtctgacaatctagtttggaagataattctaattcccaaagaaaaatcataaatagtatataagtgagtacatatccaatagtatagaaaatagttcagagatctggaatggcgatgaattggactggctcctggaagattgaatgatttatatattgtaaatattgggaagaatgtgaaattagaagatgagaggggaaaaaggtgtgttttacaaaagtgaaaaaatctgttttactcaaggttatcaatagagtggaacaagattgtggatggatgttaggtataagaatttagacttgaggcttttagcataacattttcctgagtgtgacctgaacacatccaggatacccaaagacattttcagggactgtgaagaacgatgaaccctattttcatcataatactaaaccatcatttgtctttttcactgagttgacatctacactgctggcacaaaagtactggtgggcagaattgctagtgtgttaatatgaatgttggcactaccaccaaaacagttattagtcattctgttcttcgctaccatgaacttcctgttttttgtttttttttctgtccagttacagctgaatgctattgataaagcaaggaaaattatgaagtttattaaatctcagtttaccaggtttctacatgatgagaaagaagaacttctaatccttaaagtatgatggttgcttcaaggaaaagctcttatgaggttaggttgaaagctgatctagttgcttttttcatggaatgccatttttagttgaaggaatgactgacagataattatgtttattcaaacttggacatatggtggatatttccttgaaaatgagtggagtaagcttgtcacttcaaagaaacaaactgacagtatttgttgccaatgataaaatgtgagctttcaagcaaaaagtagaattttggaaaatgtattccatcaccatgagcttgatagcatttccgttcttaaatactttttttggtgagattggtgacgatattaacaagtgtattttttatattctatagtaaaatctgtcagctcagtgtacgaatgtttaccaaatgagaaatgtatgatattaggaaatcatcatgaaaaaagtagatgcatagatgaaagatccatttaaagtgcaaaattgaccaatggattttaatataatagtatagggaaaggtcattgacattgttttggcttctacactgccattaaccttccagaaactaccccagtcaagtaatagggtagtatcaaaataaataaatctataattatcagaaaaagttattaaaatattacttccgtctcgtgtggtggcacatgcctgtagtccctgctacttgggaggttgagaacagggaccgcttgagcccaggagtttgaatctagcctagacaacattgcagaccccatctcttagaaaaattaaaatacgtctcaatttttcaaccatattgcgtgtctgaagcggggttttcattataaacctttaccaaaacaacttatagattaaatctagaagaaaatatgagaatttagttgtcttctattaagccactaactaaagatatttgcaaaaatgtaaaaaaagaagccactcctcaataacactttgctttgaaaagaacactaagtatgcacactaagtaacttaaaatgctttataatttgaggttgataaattgatatggtaattactgttgaaacagagcactagtctgtagtacctctgataaaatttgtggtgactgatgctcaagtctggttataagtgttttggaaatatgaacatttgattaacagctaacacattgtggttatctgtactctggactagtcaaattttgtttttccagttttgcatagggacacattagtaatctttgtaagcccttcagtaaatcacaagatctctttattgagtcataaccagcattgagttgtaattttcataaaatgtattccttgttaaacatataatgggcttacctttgttattataaataaatacataattgtttaaatatttctcagttttaatttcaaatatggtaaatatcaacagacgtaatccacaaaaaacaaagcactgaggtatcctcgatattttgtaagattttaaaggggtcatgagccctatcaagatttttaaaaattgtgagatctatatatgtagcttacgaatggttccagccttcaagatggtgattctgacaggctgggaagtgtaaccttcaggcgaaaccagaaggcactttgagggaggggagagtggaacagggatatatgctgacaaggttggccaagtaaacatattcaacaggtttgaggaggtcttatggatattcacaaagggagtcctgacacatgcatactgaacaaacatgtatgttacatgtgtcccatgttcattttggagtggaaacgacatttaaatgcattacaattaggtcttatatgtcaaaaggtgaggcaggagcatgaaggcattcaaatgtgcagcctctgagagcaggccagactgagcccagtggttggtggtctcttaccacgagaaagttactgaaattagtctcttagtcaatcagagctatgtagctatggtttgttggacggggggttcaactggtcagtgtctgatgaatgagctgcaattatattgcttatctagaggccagggcttgtttacctactagaaaaaggaaaaccttgtggcagttataatagagtttattcttcaagtgtagaggtacgtgacttaatgcttgccttgcatggccttaggtcatgtttataatttgttatcttattgccatgaaaagagttcgctctgttggttatcatctctagtttatcattaatgctggtcaattgtgtttaaactgcaaaaaggagggagtataatgaggcatgtccccattctgtcttggccaggaactcagttctttaaggtttctctggggtccctttggccaagggagggtccaggagcttaggactgtagttttagttctcaggccgaaaaggttaacaactgctaatttggcagaggggcaaccactgaagattttttagtcttcagttttgtctcccttgtacccagtgtctatactataatagagaggtctgattttaattcttctttaaatcccttcaaaggccaagctctttagcattccttaacacttccataaaggcccctatgaagatcctctagctttcatccccagacaccactcatcatttcacatattgcaattacttatggggatcgaggacacaccccactgtgctatttagtgccctcatgccttagcttgtgctattttcctcccctggaaagcctttcatgccccccaccccctttttttttgttgttgttgttgctgcctatgtatgatttgtctattaagaccttgattgcactcatttcccttgggaaactgttagctgaactccaaatctgggtcatgtgttaccccatattattatgacatttcttgattctgtgtccattttgtctagtggctagtaagcttcttcaggacagagaccttgtgcttaacacatagttaatgcttaaaaatgcttattgcatttgcatttgcttgctcaataatgcttgcataatcaatgataataaatgcttgcttaaaaataattaatacaaatactagttaggagagttagtctgataaccaactcgaaaatgatttcaagtcagaaaggtccatagtatgacttaagcaaaattctggtaaacaaaatcaagtacataagtcagactcactttttcctccttgtttacatgcagatcgagtgacaataaaaagttttcaaaaaaaaaaacaaaaaacgtttaacgatagatccatgctagcacagccttacccagctttccaaaaatggggtcagttatttaatatttttaatagcacgtttgttttacgaaggccagctctcacattttaaggtcactgttacaaatttgatttccgtggaagaggttttaaagaaacaaaaacttttggaataaagatttagcataactttaaaaaaaatcactgtactaatgttaaaatatgaataaattgaatttaatttcttgcttggagtaaagtagtagtaagtaaaagtagtagtaagtaaagtaatttaagtagtagttacatttaaaaatgagggtactttcttatgaatgtgctcattgccctgcaatgactaactttaaattcgtctagacgtgagaaacacatttgactacagaaatgatagatgagcacttcttattaatatttctatatcttaatgctattgaaatgcatgctaagggatcccagtcttgttgtttttttgcttttctagatgtcattccatttcagctatttccttagtcataatgtaggtctatttgcgtaccacgtgggctgagtttgcacagctgtccttgccaaaggctgccctgcagttgctccatcattggggtaaccagctgttacttatttaaagcctccatcattttgtatgacagagtaacttaattatcccctgctttggagatgctaaatgaaattatcttcaaaacaagtgcacttcatttaatatttttctccatcaagtacttgaactgtgacatttacgtcataagcactaagtaactaaatgctttataaattgaggccttctgatagggtaattattatgaagcaaagcacttttccaaaagtacctgtgataaacattgtagtgactgatgctcaagtctggttataagggttttggaaatacagaaatttgattaacagataacatgtttatttacactctagaccagataaattttgtttttcaaattttggatagggatgcattagtggtttttgtcagcccttcagtagatcataaaatctctttaatgtatcatgaccagcaaaggaaggaagggaggaggggaggaagggagggagggagggagggagggagggagggaaatactaagggtaagttttatgaaatttaattttagttatatataaaatacctgtgataaacattgtagtgactgctgctcaagtctagttataagtgttttggaaatatgaaaatttgagtaacagataacaagtttatatatactctagaccagataaatgttgtttttcaaattttggttagggacgcattagtggtttttgtcagcccttcaatagatcataaaatctcttcaatgcatcatgatgaaggaaggaaggaaggaagggagggagggagggagggagggagagaatagtgaatactaagggtatgttttattaaattttattttagttatacataaagtacctgtgataaacattgtagtgactgatgctcaagtctagttataagtgttgaggaaatatgaaaacttgagtaacagataacacgtttatatatactctagaccagataaatgttgtttttcaattttggttagggacgcataagtggtttttgtcagcccttcaatagaccataaaatctctttaatgcatcatgatgaaggaaggaaggaaggaagttgaaggaaaggaaggaaggattttattttataattatatatattatatatatttagttatatatttatataacaaataaatatagttatatatgtaactaaaataaattatacatatacatatatatatgtaactaaaataagtatacacataaacatcttggataagatataaatgtttttcttagtgtgggtaccctgtcaaaaaagtttaaaaaccaaaatcatgagactgtcacataaacctttatagaatttaccagattaaactcctgaacacacttgtaatctcacagatatttgcccatggtcatgtttttcccctttaaaatttttttctattttttaaactgtagtaaagttacacagaagataaaatttactctcaaccatttttaagtatacagtgcagtgatactaagtatattcatattgttgtgcaatcagcaccaccatttgtctctataactctttgcatcttacaaaactgaaattctatacccattaaacaatatcttctcaattcctcttccccccagaccctggatctaccattctgctttgtgtctgtgattttgagtactctaggtaccttatataagcagaatcatgtttgtcttttttgtgacttgcttgtttcacttagcataatgtcttccagattcattcatgttgaagtgtatgtcagagtttcctttttgaggctgaataatattccatagtatgtttataccacattttgtttttccattcatctgtcagtggacacttaagttgtttccaggttttatctcttatgaataatgctactgtcaacatgggcatacaaatatatcctcaagaccctgctttcaatactttgtggcatatatccagaagtggaattgctgggttatatagtaattctatttttaattttatgaggaactgccatattgttttccaaagcaacgttaccattttacattactacaaacagggcacagagattccaatatctccatattctcaccaacatgtgctttccgtttttatagtagtagccatcctaatgggtatcaggtggtgtctcatacttatgatttgcattttcctacttatcagtgatgctgtgcatcattttatatgcttattagccattcataatcttctttgaagaattgtctattcaagtcctttgcccatttcttaatatagttgtttgattatttgtttttcccctaatttttaaatttgagatacttttagacttacaaaagcattataaaagtgacacagaaagctctccttcgtccttctcccagctttccctaatatgaacattgcatataactatggtaagtaaaatgatcaaaacaaataaactaacatactaagaaaactaccaactttattcagatttcaacaatttttccattaatatcctctttgagtcgtaagatctaaccctggatcccacgttatcttaagttgtcatgcttccttggtttttttcaatctgtgacagttcctcaggctttcttcaaatttaataaacttgagaatttgaatagtactggtcagttaacttcatgaagtacccctcacttttctcttgattagattgaatgtatatactgttgggaagattgtcacacaaataatacactcttatctttgtatcatatcaaggatatgatgtcttatgtcttatgtactaatatgcagtaatatgttttattacatgtgaatgaaccttgcttatttgcttaaggtagctttttccagatttctccattatgaagttatgattttttcattggtaattgataaatatttatttggaggagatttttgtaactgtacaaataggtgtttcttcttaaaacatatccactaaatttgtcatccataactggatcttgtctatagcaattattactgtgatgttctagtgatgattttctacttcccttattcctttttcgttcactaattggaattatcctttaagggaaaagctttcctttctcttcaatttatttattcaaatatttatgtcagtttggacacataagtatttattttatttattggtttataatccaatctaatcatcatatattttgcactcaaattttttagctttgacctttgagagctctttgagatggctcctgtttacctttggcatgccccatcattttcgtaaaaattatttcctttaattttgtaccccaagatgttccaggttcatcttgtattttcccggctacaaccctgggatcgatgtcttctacaaggatgctggagaatggtatttagaaatcaaaatctggatgctaagtgtgcccattactactggggtgtcactgtctctaggctctctcaaagctagaaaacatgtatatgcactaaaccatgggcacagtcacctatttatttatttttgcatctatttttatatatatacacacgtacacataaatatatgttgaaagcccttgcgttttactgatacctctgactttgaaccaacattacaagggtcattctaacttttcctgttttcttgattgtaccttctttctcacacagtgagaaatttggctccctttatatacaatatatatctttatttgttaagccctggtatatgtatacagtagcttacaaatctaacccatagctctgtgagaaacaaatttaccaattatagtttttgtgtacaactgattttgtctttaaccttacagtagctagtcaaaacaccattttatttacttacttatttatttatttatttattgagacagaatctcactctgtcaaccagactggagtgcagtggcacaatttcagttcacctcaacctctgcctctcaggttagcacaattcttgtgcttcacctcccaggtagctgggactacaggcgtgcgcccccacacccggctaatttctgtatttttagtagagagagagtttcaccatgttggccaggcaggtctcaaactcatggcctcatgtgatctgtctgcctctgcctcccaaagtgctggaattacaggtgtgcaccactgagcctggcccaaaacaccattgttcagttactcaggtcatttcctttcttcttcacccacttcagtctagttatataatttatttgtaatacggttagattgattcgtcacagtctgcattccaccttgggttgccatcacattctggttgatttttttccctctgggtcatgtcataaatgaaaatagatagacaacaagtgtttaaaagtgtggagaaattggaaccttgtatattgctgagattataatatgatagagctactttggaagacaatttggcagttcctcaaaatgttaagtatagtttctatataacacagtggttctatctatctatctgtctgtctgtctgtctgtctgtctgtctatctctctgtcatctccacgataaagtttgaaagtccacataaaaatccgtacattaatgttcatagtaccattatttaaaatagtcaaaaactggaaacaacccaaataaacatcagctgactggtggataaacacaaggtggtttatctatatgatgaaatattatttggcaaccaaaagaaattaagtactgatacatgctatgaaatggataaaccttgaaaacattatgctacatgaaagaaggcaatcacaagattgcatatagtatgaggctatttttataaaatgtccagatttaggcagatacacagagacatatagtaggttagtgattacctagggctaggggaaggctcatggagagtattgctaatgggtacagggagaataaaatattctaaaattagattacatttatggttgcaaagctctgtgaatatactaaaaacttctgaattgtgtactttaagtggatacatgaattctgtatcaataattttatttaaaaatgtcttaatgcacaactctcttccattacattaaaagtaattcagtttaccaacacaagattaggatcatttcatttgcttgtgaagaacagaatattatcatatatttactagtgtagatttttagcataaaaggctaaggtagttgaggcttgtcaaaatttcaagcaaaagaaagttaatatcatgattgatgtagagactaaagatcatcttctgagaaatatgtgaaaatatctagcccattaccacctacccctcttttgaaaacagatttacccatatttaattataaaaatggctattatatcatacatttctgctttgatctagggcagtattgattcttcatattctttatcataaatatattttggtgttagttcataaggtgaaaactaggaaccccaatagtagagagggcaagaagcttactaaaaattagcacagccatttagtgttcgacctagttttcaaatctaggtctaacttatcccaaagccctgatactttctagtgattaccagcatgaattttgagaatgataactagatttctcaattagcatgctcatatcatttggctactttgaagacaattttatagcttctaagagaaatcattttttaatgtaataaacagtatgcaaaatattgcttttattctgaattttgagtctaagtaatatacaaaaaccatgaaaattaaatagattatttactgttaggtattaattattctaattatgagaaaaataatcatagataaacaggaaaaaaatggaaactgaccagagaagtgatcgttgatttccttatctcacgccagtaatgtctctgatccagctttggatatttaaagaataatctcatatttatgttttaccttgctcaagatggatttaagacaatatgcatacatacttaaaatcagaatattaaagtaaaaagtaaatgtggcattcagaacaaagaaaagaaaattaatttaggcaagaaaggataaagcaagggatgagattaataattgttgtgtgttaaatggtgtctcctaaaaagatagtcctacttcctaacctctggaacttgtaaatgtgatcttatatggaaaaggggccttagcagatctaaagttaatgattttgctctgtgatcatcctgaattagccaaatgggacttgaatccaatgacaggtgtccttagagtagaagagaaggccatgtggacatggaagcagagattgaagttatgcagccaccaaccaaggaatgcttggagccatcagaagctagaagagggaaagagaactgcatggccaacaccttgattttgaacttttggtctccagacttgaaaacaaacaaaagaagcttctgttgtttcttctatccacccagtttgtgtgaatttgttagaacagccacaggaaagtaacacaatactctaaataaattgtcttggtagaaaagtttttaaaatttctttccttttttccctcctttccttctttccttcctttctccctcccttcatcactccctcccttcctcccttctttccttcctcttttctttctttctctttcgttttttctttctttctttctttctttctttctttctttctttctttctttctttctttctctctttctttctttctttctcttacttctccttttctcagtctctttattgagacataattgacaaataaaaagtatatatattgaagatatctgacatgatgatttcatacatgtatacactgtggaaataattaccacaataaagataattaacatattcatcacctcacatagttatctttgtgtctgtgtgtcaggtgagaacacttaagatctactctcttaacaaatttttagtatacaaaacagtcaccatgctgccacattaaatctccagaacttatttattatataactgaaactttgtatgctttgaccaacattaccccatttcccccacccaccagctcctggcaagcaagatttcagtctctgcttctataagttcaacttttttagattccacatataagtgggataatgcaatatttgtttttctatgtctgccttacttcacttagcgtaatgttctccaagttcatccatgttgtaccatatgttagaatttcttttctttttaaggctgaataataatctattaaagaattgaatatatctcacttttaaaattcatttcctgctgacagatacttaggttatttccatatctctgctattgtgaataatgctgcaatgaatatggaagtgcagatatctccttgagatactgatttcattcattttagatatatacccaaagtgctagattgtatggcagttttttttttatttttttgaggaatcttcataatgtttttcataatggctataacaatttacatccctatgaacagtgtgcaatgttttccttttctccccatccttgtcaacatttcttatttttttcttttggataatagccaatctaacagttgtgaggtaatgtgtcattgttgttttgatttgcatttccttggtgattattattgttgagtgtcttttcatacacctattggtcatttgtatatcctctttgaaaaaatgtctattcaggtcctttgcccattttaaaatcaggggtttcttttgctattgagttatatgactttcttacatattttggacataatccattattagatgtatggtttgcaaatactttctctattttcacaacttgtatttttatttgctgtttcctttcctgcacagaagcactttttagagatggctctttctgttacccaggctagagtgcagtggcacaatcatagctcactgcatagcctcgaacccctgggctcaagtaacccgcctacctcagcctcttagctggaactacaggcatatgccactatgcctggctaatctttttattttcatatttttagagatgagtattgctatgttgcccagcctcaaaacaacataacttggtttgtctcagactcctgtccttaagctgtcctcccacctcagcctcctgagttgctgggattacaggatgcagaagctttttaatttgatgtagtcccgtttgtttatttttatttttgttgctggtgtttttggtgttgtataaaaaaactttgccaagaccaacataaaggagcttttccctgtgttttatgcaaagagttttaaggtttcaggtcatacatttaatgcattcactttgagttattttttatgtatgatataagataaaacttcaatttcattatttttcatgtgaatatccagttttcccaccaccatttgttggatgatgttttccccattgcatatttttggaacccttgtaaaagattaggtgactgcatatgtgtagctttatttctaagctctttattgtgttccattggtctataagtctgtttttatttgcaccatgctgttttgattactatagctttgtaatgtagtttctaatcaggcagtctgatgtcttcaactttgttcttctttctcaagattactttgtctatttggagttaactgtggttccgtacaattttaggattattttttcctatttctattttttaaaagtcattttaattttcataggcattacattgaatttgtagatcatgttggatagtatgagaattttaacaatattaattattccaattcatgaacatggactctctttcaacttttttgtgtctttcttcaattttttcatcaatgtcttatggttgtcagtacacagatcttccacctccttaaacttttgtctatgtattttatttttttaatgtgatggcacatagaatttttttcttaattggatagtttgttatttagtgtatagaaattcaaccgatttttatatattgattttgtatcctacaactatactgaatttgtttatgctaacagtttttttcatagtttttagattttcctgtatgtaaaatcatgtcatttgtaaacattagtcatttcacttctttcattctgattaggatgacgtttatctttttattcttgcataattgctttggttacaactcccaatactatgttgaatagaaatggcaaaagtaggcacccttgtcttgttcctcatcttagaggaaaagctatcagcttttcactgtgaagtatgacattagctgtgattttgttatatatggcatttgttatgttgaggatctttccacctaatttgttgagaattatttttatcatgaaaggatgttgaattttgtcaaatgtcttttctgcatctattgaggtgatcatataatttttatcctttgttctataagtgtggtgtatcacattaattgatttgtgtacatgaaaccatctttacatcccagggataaaacccacttgattttgctgaatgaatgatacatttcatgtgctgttatttcttacataccagtcttatatgaggcaggaaaaccctcccctgcaagcctaggaaggaaaaagctatagcagcacagtagcttccttcaagaaaattccctattcaactcacggcctatctctaggactctttaaagtcttttcaggatgaacataggttttcagctaaggattaaaaatgcatgtaggttgggcatggtggctcttgcccataatcccagctctttgggatcccaggcagattatttgagcccaagaattcaagaccagcctgggcaacatggtgaaacctcatctctacaaaaaattaaacaattaggcaggcatggtggcctatgcttgtagtcccagctactcaggaggctgaggtgagaggattgcttaagcgtgggaggtagaggttgcagtgagccaagatcctgccactgcactctaggctgggtgacagagtgagaccctgtctccaaatatatatatatatacacacacacacacacacatgcacaaacatatatgaatgtgtgtacgtgtgtgtgtatttcaaatacctcctttgcaaatactttttagttggaaatctagcacttcattttggaatgtggaaaataaatcattccaaattgttttaggacatcaactgaaactgagataattaaatgtatgagatattgctgagagaacaatgaatataaaacgaatataaaaatgatacattagtccattttcatagtgctatgaagaaatatctgagactgggtaatttataaagaaaaacaggtttaatggattcatagttccacatggcttgggaggcatcacaatcatggtggaaggtgaaggaggagcaaaggcacatcttaccttgtgacaggcaagagagtgtgttcagggtaactgtcctttataaaaccatcagatctcatgagacatattcactaccatgagaacagatgggaaaaacctgcccccatgattaaattacctccaaatgggtccctcccaagacacatggggactgtgggagctataattcaagataagatttgggtggggacacaaagcctaagcatattattccaagctggcccctcacaaatctcatatcctcatatttcaaaactaactatgccttcccaacagtccactaatgtcttaactcatttcagcattaattcaaaagtccacggtccaaagtctcatgtgagacaaggcaaatcccttgtgcctataagcctacataatcaaaagcaagttagttacttcctagatacattgggtaccggcattgggtaaatacacctgttccaaatgggagaaattcgccaaaatgaaggggctagaggccccatgcaagtttgaaatccagtaggactgtcaaatcttaaagctccaaaatgatctcctttgactacatgtttcacatccaggtcatgctgatgcaagaggtgggttcccatggtcttgggtagttttgtccctatggctttgcagaataccaccccagttccggctgctttcatgggctggcattgagtgtctgcagcttttccaaatacaaggtgcaagctctaggtggatctaccattctggggtctggaggacagtggccctcttctcacagctccactaggcagtgccccagtggggactctgtgtggaggctctcatcccacattttccttccatactgccttagcagaggttctctaggagggctccatccctgcagcacacctctgcctggacatcagacatttccaaacatcctctgaaatctaggcagaggttaccaaatcacaattcttgacttttatgcacccacaggctgaacaccatttataaactgccaaagcttgtggcttgtaccctctgaagcaatggcctgagctgtacattggaccctattagccatggctgggactcagggcaccaagtcccgagactgcacgaagcagtagggccctgggctctgcccaggaaaccatttttccacccaggcctccaggcctgtgatgggaggaggtgccataaagacctctgacatgctcgggagacattttccccattgtcgtggcagtgaacatttggcttctcattactcacgcaaacttctgcagctggcttgaatttctcctcagaaaatgggttttcactttctattgcattgtcagctgcaaatttttcaaacttttatgctctgcttccattttaagtataagtttcaattccaaaccatatctttgtgaatgaatgaaactgaatgcttttaagggcacccaagtcacatcttgaatgccttgctgcttagaaatttcttagatgcagaaaaggcctttgacaaaattcaacaacccttcatgctaataactctcaataaattaggtattgatgggaggtatttcaaaataataagagctatctatgacaaacccacagccaatatcatactgaatgggcaaaaactggaagcattccctttgaaaactggacaagacagggatgccctctctcaccactcctattcaacatagtgttggaagttctggccagagcaattaggcaggagaaggaaatacagtgtattcaattaggaaaagaggaagtcaaattgtccctgcttgcagatgacatgattgtatatctagaaaaccccattgtctcagcccaaaatctccttaagctgataagcaacttcagcaaagtctcaggatacaaaatcaatgtgcaaaaatcacaagcattcttatacaccaataacagacagagagccaaatcatgagtgaactcccattcacaattgcttcaaagagaataaaatacctaggaatccaactcacaagggacgtgaaggacctcttcaaggagaactacaaaccactgttcaatgaaataaaagaggatacaaacaaatggaagaacattccatgctcatgggtaggaagaatcaatatcatgaaaatggccatactgcccaaggtaatttatagattcaatgccatccccatcaagctaccaatgactttcttcacagaattggaagaaactactttaaagttcatatggaaccaaaaaagagcccgcatcgccaagtcaatcctaagccaaaagaacaaagctggaggcatcacactacctgacttcaaactatactacaaggctacagtaaccaaagaagcatggtactggtaccaaaacagagatatagatcaatggaagagaacagagccctcagaaataacgccgcatatctacaactatctgatctttgacaaacctgagaaaaacaagcaatggggaaaggattccctatttaataaatggtgctgggaaaactggctagccatacatagaaagctgaaactggatcccttccttacaccttatacacaaattaattcaagatggattaaagacttaaacgttagacctaaaaccataaaaaccctagaagaaaacctaggcattaccattcaggacataggcatgggcaaggacttcatgtctaaaacactaaaagcaatggcaaccaaagccaaaattgacaaatgggatctaattaaactaaagagcttctgcacagcaaaagaaactaccatcagagtgaacaggcaacccacaaaatgggagaaaattttcgcaacctactcatctgacaaagggctaatatccagaatctacaatgaactcaaacaaatttacaagaaaaaacaaacaaccccatcaaaaagtgggcgaaggacatgagcagacacttctcaaaagaagacatttatgcagccaaaaaacacatgaaaaaatgctcatcatcactggccatcagagaaatgcaaatcaaaaccacaatgagataccatctcacaccagttagaatggcaatcattaaaaagtcaggaaacagcaggtgctggagaggatgtggagaaataggaacacttttacactgttggtgggactgtaaactagttcaaccattgtggaaatcagtgtggccattcctcagggatctagaactagaaatgccatttgacctagtaatcccattactgggtatatacccaaaggactataaatcatgttgctataaagacacatgcacacgtgtgtttattgcagcactgttcacaatagcaaagacttggaagcaactcagatgtccaacaatgatagactggattaagaaaatgtggcatatatacaccatggaataccatgcagccataaaaaatgatgagttcatgtcctttgtagggaaatggatgaaattggaaatcatcattctcagtaaactgtcgcaaggacaaaaaaccaaacactgcatgttttcactcataggtaggaattgaacaatgagaacacatggacacaggaaggggaacctcacactctggggactgttgtggggtggggggaggggggagggatagcattgggagatatacctaatgctaaatgatgagttaatgggtgcagcaccccagcatggcacatgtatacgtatgtaactaacctgcacattgtgcacatgtaccctaaaacttaaagtataataataataaaataaaataaaaaaaagaaattcttctgccagataaatcatctctctcaaggtcaaaagttccacagatctctaaggcaggggcaaaatgccaccagtctatttactagagtgtggcaagaatcacctttgctccagttcataataagtttcttatttccatctgagactacctcagcctggattcattgttgatattactgtcagcattttggtcaaaaccattcaaaaagtctctaggaagctccaaagtttcccacatcgtcctgtcttcttccgagacttccaaactcttccaacctctgcctgttcccagttccacagttccacagttgtttccacattttctggtatcttattagcagtaccacactctaccagtaccaatttactgtattagtcctttcttacactgctaatgaagacatactcgagactaggtaatttataaatggaagaggtttaattgacacacagttcagtatggctgggagggcctcgggaaacttagaatcatggcagaaggagaaataaacacatccttcttcacatggcagtaggacgaagaagtgcagagcaaaggagtgaggggaagccccttattaaaccatcaggtctcatgagaactcactatcacaagaatggcctggaggtaaccaccctcatgattcaattccctcccactgagtccctcccatgagatgtggggattgtgggagctacagttcaaaatgatatttgggtggggacatagccaaaccatatcagatggagaaatggtcattttgatttgacaacatgggggttaacttgacaaaagcagttttcataaaagagtgaggggaaagcctaattggagtaggttcagaaaagaatgaaaggaaggcaagtggattcagcaaatacagataatagtttcactgaattttactgtagaatggtgaaagttgatttttaaaatatttgttagagaatctcagaagacttttcataagatagaatgtgatagccatctactggattattctctggtaaaattgaaaatgtaggtatgtgaggaaaacaagttccaagtgtgtcctttattaggtgaaggagatgggaacttatgcacaagtgggtgttggtcttatatactaacaacaataaatgctgaaacaaagattaaaggagtcagtagattgttggaagttgtatagaagtttgtgaagttctccaattgtcttttctattttctttgtgagataagaactattttatcaaataaaagttaagagaagagggggtattgcagtttttaggaaagatacatgaattagtcatgttcttgaaaggtaggattgaagaggacaatctaatagtatagcatgctgcctgagattcacttgaggcttatcgttaaccatttaaaatgagtctaattgacaataagctaactttcagcattctggtagcttttagcacttttgcaatagaagtatcagtgagttagattttagcaggttggaactttcttttttggacacagacaatggcaggagaaaggaacaaagaagtgaagaatttttcaaagcaatgcttttaatggcaatgaaatgcaagacagataatgaaggaatagatgaatatgagagggcttatatcctggagtatcacaggaaattgtaggattgaagaattgttgatgtgggtaagagaagaaataggcttgaaaaagtagggtagtggtcagagctcaggatgtttgaagttaagacattggcaagtgtgcaattattcttaagacaaatgagagaaaatgattattgcaagtgagaaatgaaaaggattgaaaggccaaggaattgggtggactatcaatgtacatgttgatatcaaaaagaatagtaggggagagagacagagatttagctggatacaaaaccttcaaatattatgtcaatggtacactgtctttttcttgttattcagcatttcaattctttttgcaccagttgtctctctgggattgtaggcaagcaataagggcagatattgaaattttatggtcaacaccagatattcaaagtgtcctacagtgctttatgggcttcatggtttatgaggcaatttcatatgcattatcttatttatttttatagttatctagtgagacaattagagatgatatcgttataaaaggtttatagatgaggaaattgaagtttgattatattaaatcatttgccactatatctatggctggaaaatgatttaaaaaatttttccatgagaccaatttccacatggatatgttctgagaatggtaaatggaagtttattgagtatcacaaccaaatatattgacctcattctttgacatgtttataaagcccctgcctttgcctgaatatttgtatgcaatggaattttaaaaaattcttaaacatatttgattttgttttcagaatacattttaattttttctgccctttgctgagataaacactaagtattttgttttaagcacacatagtaattcataacatgttagttattgtagtaatgcattattaagagtatacactttgtttaaaaggaactagactaactatacttataaatacagatgtaaaagagtaaataaaatagtggaagcaacaattcaatagaattaaaatactgtcacaatgagaatatattaaatatacaaggaaatctagttattttgtctaatcataaaagccttaagatactataaatggaatatgaaaaaagcatgaagccttcgatatctgttcttttttaaaagaaaagaaattgctgtgaaaactagtaatagaaaaatgctctcatttgctaatgaagaaaatttgtcttaaagaattaaagccattcataatgataagattctagaggcattcttgaagactcagcaacgaaataaactaacacaggaacagaaaaccaaacaccgcatgttctcactcataagtgggagttgaacaaagagaacatatgggcacagggaggggaacatcacacactgaagcctgtcggggggtggggggctaggagagggatagcattaggggaaatacttaatgtagatgatgggttgatgggtgcagcaaaccaccatggcaggtgtatacctgtgtaacaaacctgcatgttctgcacatgtatacccaaacttaaagtataataataataataaaagaatgtttattccttaattttatttagaatttacccagaaattcaaaaccaatgcagtatgtcctgaggattaagttttttgtgtcaacttaactgggcaaagggatgccttatagccaatgaagcattatttctgggtatctttatgagtttgtttccagaagagattagcatttgaataggtagactgagtaaagaagaccacccctccaccagtgtgggtgggcatcatccaatccattgatggcctgaatagaacaaaaaggtacaggaagggaaaattccgtctctcttcttgagctggggcgtctgatttttttctgctctgggacatcaggcctttggaatcggaccagaacttatatcattggctcccctggtactcaggtctttggactttgaattatgcccctggcttttctgattccccagcctgcaggtggcagatcatggaaattctcagcctctataattgtgtgagccaatttccataatatatacatatatcaataggaaattggtatttggagaaccctgactaatatggacattatacagaatcaagaattctacttcttcaaaaggaagaggaaaaataatctttcttttttcaactatcatattcctagaatatcaacagacatcaagtaaatgcttcttacattaataaggaatacaatgaccagatgcattttaaatgaaaaaaatcaacatctctcttatatcctattaataacctgttagaaagtgtgatgggttaaaaaataccctctttataatggaaccattacattctttagaacaattctaactaaaaaaaaagtaccttttttaagaaaattacaggattccactgaaagactgagaacaagattttaataaaagacacacttattgacaggaagactgaaaaagtataaaaaggcaaatttttcttaaattaactaaacttcacttaaattaatatccatttataacttaaaatgcattattagcaaactaagcatataagagaatttatctaatctggtaataagtgctttataaaatgcagcagatacacttaacagtgaattgctaaaagttttcttcctggatttgggaaaaaagcaaagatgcctagttgtttttcatactgaaaataatttctgttattcaatattgtactgatattcctatctagtgcaagacaataaaaagaaaaaagacataaagtttagaaagaaaaggtaagattcaatatttgcagatgacataaattctgtgtaaagatattccaaaagaaattacagataaactattagaatcaataagtttaagaagttcactgaatataagatcaatatacaaaattacatttctatatagaaggaatgaatacataaaaataaaaatataaaatttacaacagcataaatatcaaataactaaaaatatatctaacaaaataaatgacctctacatcgaaaactacaaaatagtagagaaacgaattaaagaggacttaagtaaatggaagtatataaaaattcatggatcagaagattcaattttataaagatatcaaataccgagattgagctatacattaatgcaatcctaatcaaaatcccagtagggatgtgtgtgtgtgtgtgtgtgtgtgtgtatcgaaaactggcaagctgactctaaaatttttatggaattatacaggaccaagaagagcgaagacagtctggagaaaaaaattaagttggaagacatatactaccaagtattgaggtttgctatcaaattatgcagtaacaaagcagcaggtattgatacaaggatggaaaaatagcccaatggaatggaatagaattgagaaacagaccccgtcatatatgttcatctgattcatgataatggtcacaatggagggttgtggaaattctttttcaacatatgtagctgagagaatttgattatcaaaaaaaatatgctaggagagtaaggaaaaaataatctgaaagtgcaaaacttaccggtattattaagtacacagaaaaacacagactattataatactgtaattgtcatgtgtaaactacccatcttgagtaaaaagactaagaaatgaagattaaaaataacaactacaacaacttttcaagacatagacaatacactaagatatacatggaaacaacaaaaacctcaaaagtggggggatgaagttaaagtttagagtttttaatagttttctctttgcttattagtttgtttatgtaataagcattacattgtcatgagtttaaaataatagctgtcatcagtctaaaaaaataagatgatatttgcaagcctcgtggcaacctcaaatcaaaaagcatacaacagataaacaatgaaaaattagcaaaaaattaaaacataccaacagagaaaaatcacctccactgaaaggaagtcaggaaggaaggaagagaagaccacaaaacaatcagaaaacaaataacaaaatggcaagagtaagtccttacttatcaataaagtaacattgaatgtaaataggctaaaatcttcaatcaaaagacagagtgacagaatcgattcaaaaatcataaaaaataataaaaaactacaagacccaatgatctgttgcccacaagaaacacacttcaccataaagatgcatagactgaaaataaaggaatggtaaaatacattccatgcaaattggaaccaaaaaggaacaagggtagctatacgtttatcagacaaaatagatttcaagacaaaaactataaaaagatggcaagccacacagtaaaagaagtggaagatatttgcattatacatacaagaaacttgtatccataatatgtaatggaggagctaaagttgataagaaaaaagataaatgactcaatagaaaatgggcaaaaaatttgatcactttcagaagaagatactcaaatgctcaataattataggaaaagcaattcagcttctttaatcatagaaaactgcaatttaaaactgtaactatattttatgtagtagaaacacagcataatggcaaaaataaaaatgtatatatataaacactatatttaaatgaagacaaatttgtagttattttttttcttagatattcagagattggcaatagttgtttccagagacaaagaagttggttacaggcagtgtcagatttgaactagctgagggaaagaggtcaaaagagaaagttgtacatcaggcacaagtgcaaagctgctgacataggaattttaggctattaacttgacagcccaacttccttttggaaatgctgttatatagacttcctttcctataaactccctctggtactgaaggctatatgaagtacctgaaatgattcttccttgaaaatttaataaaaagcctagcttggtgctttctttccctaaccaaagaccgaggtcactgaacctaggaataaatttaatggcttgggattatatttgatagactagacactttgttagaacatcgtattaatgtgcacaaggtcaatcgttacaatccatctgaggatactgtaatttcatttttctgccatagccatggaaatcatctgtcatccttctcagttttcacttgttccttagtcagaggggctgactaaccagttatacgatacgtatccaccacttgtaggaaaataattcaaagtatatgcactgagtatacaattttatttcccactcacatagtagtctgaggtagttcctggttgaatggcaattttcttccatggagtgattcaggaacccctatgtcttccatcctatagctttgcatcccctgatgtctcttcatcataaataatagaatcagcaacaggaggtaagagtttctagggaaaagtgcacacacattaattctgtaaaacacttttatgacatttatcatcttgttcacattatataggttgaaaaccagtcaaataaccacactacatctagtcagaacagtcgatgactggccaggcactccccagaaacaatccaatacaatggaagaaggagtacacattttggtgtcctgttagctacctatgccacatcccttttccctattacaaatgtctgtctttttctcctgagtgtcatcttggtaaaatgctacatttataaagttgcttggtaaaaataataaaaggaaaaagaaagtataggaccattttttgtatcacatcaaaagaaagaatactcaatatttcctccacgacaataaaagttttcacttgagtgcaattattctgaaaactgaagcatcagtagtttgtacatatttggaactcagcctatcagatttactaatggaataatttatccacataattctttactcctactcttaggaacatagttttaataatagcatccagatggccttccaacttaaaaatgttttatgttccaaaattatgctggtaaattgactggtggcatttgagatataattttatacatataatattacatgtgataattgtctttatgccatccacaaacgtctatctaactaattgtctaactgaaatacaggacctttgcaatgaaaactgtagtaaatattgttattgtgatgtgggtaattaccataaaaatcctagaaataaagattcattttgaatataaaatatttaattaaaatttttaacaccataatatataaaacagctattataactgcacataccttgtctgataatagctagatgtgcttttttattactgaggaaaatacaagttaccctatttaatacctatattttcacacttggaaaagttcacattctgtcacagtaaagtgtggtaaaacttaacagcctcagttttaaaatatacttggaacaagtcataactagttttattgcaaaagattcctgtacacatttatattaattttggtaccttgaaaggctgcctggcaagccacttccataaggaaacatgcattatgagaagtgagaaatatccatcccttctacatatttttagttacttgtcactcctcgacaacaatgctcacatcactgaagcatgtgacataactctttatatttattctaagggaaaaatgaaataacttaaaggaaaatgcaatgcaatgtaaacaatctcttactaaaaacaatacattaagccaaaagtattttacagaatgtattacaagaaactaaacacagtattgaagattctagctgtgatcatgagaatgagatgtagaattcatccgaaataacagcatcatttgggattgagagcaagcctaggtaccagagccagaacctccaatgaatgaaggcaactgatggcagatacgggaacaaggatgaaagaaagaggatgtagagttgaatgttaagacagtttcaaaggcaggatattggagaaaaagacaagtctgtaatgacctggaagcagcaaaggtgaataaaggatggtccaaccttatcatcttccctgaggaatatgaattgaagaaataaagacaaccatgacttgaaagtctggggtggaaacaactctcttggaaagagcagtttcagttaagaccacaagggcagaggcagggagaagaggctggggatagagaggagttgtggttgtgggttaggagtacaaagcacactaaaatggatttacaggtgagagatgtataaagaattgagtgattttcaataaaattcagagtattctagttggttcagtggaatattgtgtctgagctgcatcactttgggagcagactggtgattagaggagtaatctgctgtccttattctcaacagaacacagggcttcagtaagagaagactcagtcagactgctaatgacctaaggactattcaggacctaagaaggttgtccagttgatctgggtgggggcaaaataggtcatctgaacccaggacatcaatgaagttaatgaaactagtagcataaggcactatgctcatcaaaaagagggatatttcagatgatgtctgagttcactgtcctaggagatttagatgcctagggcttctgagtgactaatggctctaaaatatacttacaagtttcttggttctggctcatacttcacaactctcttgttctgagaacttatgtcagttgcagggctaccagcaaggtaatgactgtcatgaaatggtcctagaagctgtctcaaactgttgtgggagggacttcgggctagtttctcattgaaaattgtacataaggcttttctccttcactctcttgtatttagctctttcaggtacctggtcacggtaataatcttaaagccctgtaggtgctttattcagagtaatgcctctgctaaagctggtgaggattttcagccgtagataagattgtgcaacaactaagctctcttttacatcacagagcttatggaataatgtgcaagaagaggactttttgtctgtggtctagagttatgagtactggtcaaagccttctccacctttcactggtagttatttgagacctacagtttctgaggttgtgattactgggtgttttaaggttttgacctatttgaaatgattttgtcttttcctgaaagctgtcattaccacaaataattgaatcttcaacatggggctcttagtgccaatttgtgtaatcagtacacactgtagcagattactggtctcatattagtgcatgcttcatcttggctaggtatagtgacttggagaggtcaccatatgtatggataaagttttaattttctggagtgcttcagccatagctagtatccaagcagacccatatatctacatcagacatgatagtgaccaattatagaaagttctaaatgtcatgtctgagaattttcctctcttgaaacctggctactttgaccttcatgggaatcttctggaggctccagtcctagcactaagattttcttatacccaggaacatctccctatatattgtctcagagatgtagtaagtctagggctgtcaggatctaggcagacataaaaagagcaggtaaaaatattgctgaatcatggcaggtcatgatccttgagttgtgaaagataccatttatcaaggtgtggaacacagaaagggttctgagtctttgaggctgagttggaagtggttagttgtcttatgctttccaccctttcagatagagttccctttacatcttcctcaactctccttatcatagggctgtccttagtaaaggggccaatcttagcaaatatccaggctccccagagatagcccagggataaggggtgagtggagcctctgcattgccaccgtaattagttttttcagcacgttgggaaaagatacccaccattattttcttcctttcaaatagcagcaagacactataaaatattagaagaggagattaaacatcagaaaaattgtctctgccactatatttgccatgcacttgcatcactaattctgaaaaggactgtaccctacctaatacacaatgaaaagcaaaataaaaatgctgatgtaagtgtcagaggatgagaggtaggggaacagcataggagctgggggtgaatactttccttgttttccttgttctcactccatggctggctctctctcaggcagggtcatcatcattctgtcagtcacgtactacctttctgatttactcaccatagttttagttccatatagttttgttttgttttctcacttctaatatctatttcctgggcaatcttgcattttttctagatgtatatatttattggtgtaaagttatgcaaaatttgcttttagaattaaaaaaactaatttgtactggtacttacatcttatttttcatttctatgtggacttatcatattaccaaatatgatatggtttatgagtactatagttttctgtcttatcgctttcttcttttatatcaaatactttcttctttctctgttgagtttactttttttttttctattaaagtttacctagttccatgattaatttttgagatttcctgcatcctaagattgccattttggactttaaattttccttcaagcaccacttaggttgtatccacaagttttcatacatactgttttcatgattattcaatttctaaatagtttgtactttcctttttataggagttacttacagggatgatatttggtttccaaataaaaactcatatttatttataaattataattttaatttgattacctttttaggtgaaaggatatagtctcatgtttcctgttatgaaaattttatttttgttgctggataacctaattcataattgatctctgtgaagctcatttatgttttaaaataatgcagtgaaaatgataattttattactgacttattcaaactattcttaattatatattgtataatcaaatttctatctttgaaaagatgaattaaaatctctcatgatggttatggatttgtctatccttgcatttctataatgcgttgcttacatacattgtgataatggattaattgtatgtgtgtatatatattctttgcataatttaatgattatatcttgcattctattttgtcctatattaatattactttccagatttctttgtttacattttcctggcatagaaaatgtattttcaacttggcttattataatctttatatatgcttttctcttttgagaatacaatttaaaatcaaacctgataatatctgtatttaaatagggaatttagtgtttataatgaaaattaatgatttatgtttgctaatgttttctgttttctttttactatgttctcatgtttctttttttgtcttctctgaaattattttaactgatcaagttttctctcattttttttcatttgatagttcaggagttttagatactattttcatttttttctaagttgctcttaaactttaaacatacactttatttttttttttggctaacaacatttagaagtaatttgctggcatatttttaaaatcttatatcacatcttcttccctttttaggaataattaccaaattattggtaatttatgtcttgtttcttgttttcttggtcaaccttgtgagtggtttaattttacagtctttccaaagatttttttttttagctttgttgattttctttatgttacatttgtgttctattttattgacttttatctttattatttccttccttctatattgattggatttaattttctctcccttttctttagttttttgagatgaataatcatatcaagatttcttcttttgtgtctgctttagcccatgacttttgatatgttgtatcttattattcagttcaaaatatttgctaatttccattgtttttcttttgacttatgagtgatttagaaatgtattgtttaattttcaaacagttggcaattttcttttgttatttatttccaacctagttctattttctaatctgatttcacattagtcagatagcataccctgtatttaaatccttgaaattttttaggatttcccagaatgtggccatctggtaatttttttctgtacaatttaatagattatttttcataagttttggaaaattattgtccagtgtctcttttaagtgtttctttttatctattatatctctcctttctttctaggacttaagattcatgtttattcaaattttgtatcatgttttatatatctccaataatttctttctgaattttaaaaatatttatagtctccatccttcaccgtggatattttttttactgatttatctttaatgcatcagtcatttcctgccatgtagctaattagttattaaactcatctattcaattcaattattatatttttcactcctataatttttgacttcaatacacacacacacaggcacacacacagacacattccagtcctctgatgaaaatatcgtattatgtattttcttcaatacatttatgttaaagttttgtctgagaagcctggttctgatcatctgtggcaccatttctgtcacctgtttagtttttgttgttgtttgcccacggtttttggtcatttgtttttgtgtcctagcatgcctggctggtaatcttttattgaataactgacattgtacattttaaaaaaatgtagatgttatatatattgttatttccttctagagaagcttcaattttctactagtcggcaattgaaatatatatatcaagacatttcaccttgatataatctgggattgggataattcgaggataagtttcaggtttttatggatttgtctatttctgatttacctttcctcctcagcaatatccctttagatatattggctaaatgtctgatattttatgagtaatcattctcctccatggacctgaattctaactgaattctctctgaatctagattatgtttgatttttttttttttttttttttttttttagcttgctgctttcttacacttaggattcagcaaagtctcaagggaaaaaaaaggtataaaatacccggtttacttctctgtagtaccctagaattgtgggtccttaagtcctgattgcaatgataaccccaaattccagattttatctccctagtcccatgagactgctgacaggtctgtctaaagatttctgtctttcctatgtagaatcagtacgttacctgggaataagaggcagtggagagtgctggacatatgtcaatgtgctttctttttccttactaggatcttggtcccctgagtcctggctaccttggttctcctctgacacctccaaatagtcttttttcccttaactttatgattgttttatagttattctcagaagttggtttggtttgattatagctactcctccatagccagaatcagaagtccttcatctactgagattttattttaatgattaaaatgttagcttatatgaatttatttgatatttttatggatttgttatttttttttcaaaacttctctaagataacaataattttaattccacagtcttccttctttagctctattggatctatttttgtatgtttatattattctctttgtaaggtgtcttgattctccttaagtatttgctaattcttggttgtcagttcatctgtatttgaatccaccttcgcctgcctgctgtattgtcaatagcctgtctctggtgctatagaggtggaatggtgcctatgcagcaatgtcttctgcatgtagggaatccctgttctttctggtggccagtggttcatcagagacttttctgctccaacccagtgcaaactcaatgctaaacatcatttaaaagattaacttatccagctcttcaggcccatattctcagctagattattttgtcaagtttaagaagatgtaattataagaaagccagagctgttctaggatccacatgaggcttttatttatgaagaaagtagctgattaataacagcagaaaccctctaatgcacaactaaatattaattgaagtgctttaactgtgcctctattatttagaagaaatttggcccaaatctattagaaaagggatgcttctctgatttggagaggactcaagtcacattaatcctgctctttcacttctcggtgtatttatgggggccagatggtgtgtggtaaggatatgggctttcaaattagagaaacctcagtttgaatctacactttattttcatgtattgtatgacttttcaaaagtgactgtgtctcaaaaatgacttcttcgtgactgtgtaattctcaaaaatagacttattcattcctaccttacaggattagtgtgaggggttaaataagtgcataaaagttttggcataatgctgtacttgatcctcaataattgatagatgttatggttgtagttattgtacagtatctaaactcatcgttttaatcaatatcagacatctttgagattctattggtatatttaaccacaaccaactactatcacagaactttcagaactttttcagtgatatcaactccccattcctgttagttttccagggctgtatcacacacagggtggtttaaacaatagaaatcaatttcctcatactgctggatactagaagtctgagatcaaggtgtcaacaaggttattttcctctgaggcctctctccatggcttatggcttgtagatggccatcttttccctgtgttatcacgtgattttccttctgtgtgtcttgtgtcctaatttcttctccttataagcccatcaggcatatgggattagggaccaccaaaatgacctgattgtaacttaattacctctttaaagaccccgtcttcaaatgcagtcacattctgaggtactgggggttaggccttcgaaatacaaatgttggaggagacacaattcagcccataacaccatttttcttgattcttactatattaagggatatcaccagaaaaaaaaaaatagcacttttaaaacatcatgtgcctccgcaaaagcacctgcactgagttactgaatcaattattttgtctttaaaaagggttatagagaaaatatctatctgaccaagatttagtgcctttcgcaaaactacagttgaaaccattttcataattttaccaactttccttagataacacaacctgaatttattatttagcctaaaatttaaattctagcaaggcttccgtctctaggcagtgataaatataggattcaacatattttctcttttcctggcttctagaactatagacagatagatagagatagagatactttaaaatatagttcagagataaattttgttcctgaaacaattgtttcctcttccttgcttctttctaaactaatttatacttttatttatttgttctctacctgaaaatattattatattttgatatccgttcaaatgataataattaaagacatccccattgctgttattcccagttctgtccatgctgctgcagtgataaagggccaaaagttaccatggaagcagaaatccacgaaggaaaacatgagcaaaaatacctgtaaaggaggaattaataagcactgagagagtagacaccttgtattaattttcatatacatatcccagtagaaaatgcaacatcagtttacttatttactatatttctgtaaataattctcatatataataattgaaaattaaagaccacattttatttaataatgccatagttttaaaaatttactctgtttttaaattttccatcaggctttaataaaaacaaattatttactaatccaaatattaaagatcacttatgtttaattatagtcattgtaaatcagatagattttctccttctttaacagatcttgagcttccttacgtggttctttcctatcattagagaagctgatattctgcttgttggttgatgctgtatcattctctttagctagtttccacctctcccaatcattccaaggttaagggttcagaaagacctcacaggagggagaacaagccctgctctgcatctgtagtcttccttcacaattctttattcgtagcttttgatttgactcttcatgttgcaaatatgtgtcctgagccgaaaggggatgtgataagtgactgcaaatggattacagacaactggtctccacctccactaatgaaaacacagtgcaatgtatctgacctgctgctgggtcagcagcactgtgatttctacctgacaggagaaacacaacactcaggacggtgatttttcccagagttaaattggactataattctttgctgtggtgactctaaagtttcccacaaacataaagtatatttccttatgaataaaccattttgcttgtatgtgtgtgtgtgtgtgtgtgtgtgtgtgtgtgtgtgtgtgtgtttctgctataaaggctaaaagtcttgaagctgattttgagagagaagtagtgttaagcgtttctgacgtggagaatgaaggaagatgaatagagaacaggttgtcaaggttaaataatgacaataaagctatcccttattaattaatatatcccaggctctgtgccactgtgtatatatgttgtctcactaaatcctttgatttaagtctatgaaaacttagaagtaatgtgagtgcctgaccctcagttatacagttaacttgttttgagggcagatcccagagctctcctattcccaaagtgaaaacgactgactttgaattatactgttcattgctgatggagagcaaaatggcccattattaccaagtttactgtttaaaagggcattatgtttatctgcccaagattacatttctctcccagcctagagattgctatgaaaaagaatggagtcctccagtcctccagttttctgatattttgtagtttcagtatctgtttttttttttccttcttggaaatacatgagttatattccttaaaacccaaatttgggagtatgaactcacaccaactcaaaagattatagagaatgtctgttatccaaacagttttctttccttttttttttttattatactttaagttttacggtacgtgtgcacaacatgcaggttagttacatatgtatacatgtgccatattggtgtgctgcacccattaactcatcatttacattaggtatatctcctaatgctatccctcccccctccccccaccccacaacaggccctggggtgtgatgttccccttcctgggtccaagtgttctcattgttcaattcccacctatgagtgagaacataccatgtttggttttttgtccttgtgatagtttgctgagaatgatggtttccagcttcatccatgtccctacaaaggacatgaactcatcattttttatggctgcatagtattccatagtgtatatgtgccacattttcttaatccagacagttttctaagtgctgagtttacagccgtgaacaacacaggtaaaattcccaatattcatggaatttttattctagctaggggaaataggtaccacatacattaaatgagtaaaatatatagacttttaggatataatgtgttagatactaaggagtgtgataaagctaggaatactggtagaaggttgggggttacaattttcaatggtgtgttcaggaaaggtctcactgagctggggcatttcagtaaagacttgaaggcagtgaagaggcaagccaccagatataaaagtctggaagtagaagcatgcctggtatgttccaagatcagccagggagccagtatgggtggaagggaatgagtaaaaaaagagtaaaccagaggagttctcagaggatcttgtggaccattgtcaagatacaatcaatgggaagtcattggagagtaggctttggagagtaggagtgacctaattcagtttatgaataatgggattattctagcttctgtgttaggatcaatcaaatgctcaaacagaagagagcaagggcagcaggaaagagaacactaggacagttacagtactgatccaaatgagagatgatgatggctctgagcaatgtaacaccagtggagacattctgaaagttctgagcaaattttgaaggtagaatcaataggatatggtcatagatagggtgggagtataaaaaaggagtaaaagacaatttcaagttccctgtccacctgctctcccaagaactagaagcacggtattaatgagatagggtagaccactgggagatcaagtttagggatgaagattgggaatcagaggcttgttaagtttcagatgctgtcaggcaccgaagggagtgacccaaaagacaaatgcctttcctaagaaaagcccggaatttgtcagtatataagtgatttttaaaagaggactagctatataatttgtggaacccagtaagaaatgaaaatgcaggagtctttctttaacaattattacagacttcaaaacattcgtggcagagcattaaaccaagcatggggcccttctattacagggtcttgtgtacaagtgcacacccatgaagcttgtcttggtttaagggtgtaattctaatatgatcagcaagcgagtaagagacagagagaaaaagactaagcaatgaaactaggaagatatttaatgtaaacaagacaggaacaaaataaaaacgtttgatatgagcttggtagtggtttcaggctcagccagcaaagctgaatggttgcctctggtttttgcaattttcaattgctaggggaattttatgagtttggacttttgcatgatagattgatttggggtgttaccacccacaggacaactccagtttctctataaacttcttcatctttaaaaaaaaaaaatcacttctagtagtaaatggtattttgaagtccattggctgctaaaaagcaaaagaaaacccattttttgatgcaagtttcactttggcagacacgcagatgaggaagtagaaacagaagcagagaaatacaggctgtcagtgttagtgtagctttctagctggtcaaacggtatgcaaagcagccaaacagaacctggtgactaaaacaaagtggtaagattaaaccatcgagggcaaaacagaaatagtcaggaataaatactgagtctgtttcttatcacgtggcataaagttgctttgagtgttaggtttcataatagtttaccttagttactaaggggttgcaaaaataccaggttggatgtcagagtctgtggtggtctgtgcactggcagctggttgaaagcaaaagactgacctttatcctggaaaaataaaatctcctccctcctcactcttcctggagtctttaatgataccacatcatggcctacgttgagtagaccttgatatgtacaaatgacctatccagagtttgaagagggaactgtaataggtcccagaaaagatttcatattagtatgctccattgtcacagctcacccctggcttatctagagattgcttaaatctgcttcagggcatctgactgcttcaggttcaaaatgtccatggggcatggaggcagagtaagtaacaagccatcagtgcgtgtgatagaaaagatagtccccatcctctgggtgttagtattttggagtgacagggccaggagggagcacgtaagagaaggctgggaaagagaagattattattgacatatccaatatcattgctagcatctcttgaatttttgtgggttagtgggagttaatacagtcccctcctgcattctgatgagctgtaactttgagataaagagctgttatattattctaagcatgtggcccaggcagtaaatatggtcttgagttcacatttggacaaaattttattctgtctacattaaagtgagattacaaaggccttttcctcaacatcgtatagtcagagcctggctatcagctcttctctaaacaaaactggtttgaataagtgtgtaataggtccttcttttgtcctatactcctgggaggatactttgttagcatatttttagatgcaaagttgtagggtaaagaatgtttcttgagctatcttgtatctgtaagagattttataaatatatcatgctaccctgtaactcctctatgagaaaagtattacccccaaccccaccctgtgacatagataagaacttactgttcagagaagaaaataagataccatatttgtccaataaccagggaagattgattggtttagattgtagcctgggaggttggtttggggactttaatcacccagaaaataactctagagtttctctgtaaactttatcttttaaaaaaatgtatttaagtggtggttcagaattcatacccaggtctactggaacatattccttccatggccctgtaacaaatgctaggccactgtaaggttgtggacttagggtatgattttgtggatttctttaacttttattttaagttcagggatacaagtgcaggtttgttatataggtaaacttgtgccatgggggtttgttgtacagattatttttatcacccatgtattaagcctagtacctgttattatttttcctgatcctctccttcctcccaccctccaccctccaaaaggccccagtgtgtgttgttcccctctatgtctccatgtgttcttatcatttagctcccacttataagtgagaacaagcagtatttggttttctattcttctgttagtttgctaaggattttgttagatgcctttcctgtattaaactcacattaaaatttttcagaagctgtcttaagaaagtacataattaagatcagcattttggtataatttgaaagtatagcgtccaatgaagagcttgctacactaaccatggtactatttaattctaatatctgtgtttattacatctttcattgagttggcttgccaaaaggatagactgcggtaatttatttaacgaggaagctagcattccaaagtcctcttcatgtctaatatttggcaggattaaatttactatatatcgcagaaattattccaaataagagaagactattatttatatttttggtaacagagaaaatgtataggatgtttattacaaaaatatttttatactatttggactagtactatacatgttagcaagactaacagattaaggcacatttaaaaaatccaactaatcagtatagatgttcccatcattttatggctgtttcgtcgttggatttgtttgtttgtttttaggctaaattgacttgaaagagtctgactggtggttttctatttgactggcattggaacatgtatgggtgtggtttgtactttgccacattcttttcttacctttatgtcctctctctgcagtcaattttctatgtaggtttttgcagcaatgctagcttgaaaataagcaggaattcaaaaaagattaaccaatacttaggaagcttaggaatgtttaaaataataggttgcttaaaagtagatggcaaaacttaggagatttataagccgtaaacgtacacatccctatttcattgggatggtcttaattgtagtaaatcttgtaaactttgtagtaaatctcgttaaagcattttccacacttaaacaatgagctcttatgcaaggatgcaaggacagccttagtggcagatgaactgggcagtaaattcagcagtgtgcatggtatgattttatatccaaagacagtttcttaacttgtgcctcacatcctgctcatggtttggacagttctttaccgcaaggttttgccatctgttaagagaaaccttctcctctaggaaaaggcaacactaatgctgattcagttatttacccttgagggcgaatggttttttttgttttgttttgttttgttttgtttttgattctttatttaaaaggacacaattagtttggtcttgaggattgccagatgagatctaactagtatgatagatgttagcaagactaacagattaaaacatatttaaaaaatccaactaatcaggatcatattcagagatgtaaatagagtgaacagatctattaatgagggtcgtagatatgacaaagggagaatctctttacagtcttaagatgtggtttctccgtggcctcagtatcccaagttatttggggaaaattctattttgagctcaggacatgaaaagtggaaccagatcaaaggtttttgtttctgtttttaaagaatgaaatactgctgtttctgtttctataccataaccaaaaaagaaaaagccaaagcagtgattttagctttggtttttttttcagattcttaacctctagcttgtagaaagaaaaaccttccagaaagagctctctctgtaagtatcagagcagtcgatttcagtgggataagggcaagcaatgagcacagggggagaatttcagaatgcagtgaccgggaccatatcccagtgcatatatcttggagggaggagatcttacatattttataaaagcacctgacttatttcgatatgatgctatcactgagaaccttctggaagtgttctttagagggactgttaaaaaaaatcaagcccttatgacatgcttgtgatttttggtagttggaattatgtaatgatgtgaagatgcaaccactagcattattcaagcacaggtgtgtaatagtgatgttctggaatgttgcactcccactctattttcactatgtatacttaccttctgggttaaacttattgctacaataacacttggcccactagtaccttctaaagaagttctgtgtggcattaagtgttagtgttttgccagactggtttggtccccttccttatgtatgtttatttataatctaaaaaggaaaataaactccaccagcttggttgtttgtatttttattttaataaattgggttcaataaaaaaataaccttactcatttacatttgcaggttaggacacaggaatggttgactataattaaggacaatttcaataagtgccttttaatgtgcctttagcagagaagctggaacaattttagaaaatagtatgttatttgctttatctcctactgttaggcttaccaacagtgattcttttttttttcttccctcagatgtacatccagacaacaacacttactgtctccatgagtttaagtgcttcagtatctctgggcatgctctatatgcccaaggtttatattataatttttcatccagaacagaatgttcaaaaacgcaagaggagcttcaaggctgtggtgacagctgccaccatgcaaagcaaactgatccaaaaaggaaatgacagaccaaatggcgaggtgaaaagtgaactctgtgagagtcttgaaaccaacagtaagtcatctgtagagtttccgatggtcaagagcgggagcacttcctaatagatgtacgttgaacattcttctcctagtcttggggattgtgctacatgtttccaggggcatgatggtactcacataccgtgacaccatcacatttaaaaccattcgaagcaaatggtctcaagatgagcggctgttctacagagtacaaacttgctcacaaaatctcttttacaaagcatgacattcagatctttcttttgaagcattacaaagcttggtatttgaaagcgtcatcttcttataaaaattatcttttagtacttggaaacaattccacaatttttcttgttccatactgggtgctttttatagtatcagtagtttgctgatacttacagaatatcactacagatcttacacatataaatgatgttatttgtgcctttagggaaatgagaactctagttagccaatatgtttagttaagtcacagttaatacttgtttctcccacgtggtcccctttccttgggcttcctgagggcttcccttgacttcccttcttggatatattaagataattaaagttcttctttaaaagcctcatgatcctggaaatagaatcttttctacaaccacctttccatttttcttttctttacctattttcgtctctacagtccacccaggaaaaagcacatgataacaatacacagaaatctgtgctcaaccagtagaatttaactgatctattgaagcccatcttggtatctatgaaagagtggcaaataatttgaagatttgtatggtaaaataccaggaagctgaatatggtaaacattacaacctttaccttactaggttctacagatgaatcaaaaaagaaagaaaagcaaaggtacttgtattagagtggcttccagtcttttggaatatagcatagggattcaatatttgttttttctgtttgaaacaggagcttgctctgttgcccagactggagtgcagtggtatgatctaggctcactgcagcctctacctcctgggttcaagtgatcctcccacctcagccttccaaatagctaggactgcaggcatgtgctgtcatgcccagctaattttgtttgtttgtttgtttgtttgtttgttttgtagagacagggtctcactctgttgcccaggctggtctctaactcctaggctcaagtgatcctcccacctaagcctccaaaagtgctaggattgcaggtgtgagttaccacacccggtcaggcattaaggacaaaatcctatgcaaaaatattctcttcctctcatattcatccagcagtctgtatcccctactctccatacttttgacactaaatataagaaaaaactaaaaattaattttatttggtttaattattatagcaacttatggtctacattccatctacaaaccttcttttctatcaagatttctagataagcattgtctactctaatttaccatacacagaactatcctgtgatagttaattagcattgcttaattagacatattggtttcagttactatcagcttacctggaatcattagccagattggttctaaaaagattatcttcgggtcaccaataccaaatttagtcacgtgtagagaaatgaaccttacaagaatttcacaaacaccctccacatattcacctttctgcaaacatgaaaccttgtgaagtaagaaatatgcgaagcaaggtaaggatgggctttagtaacaaatcattacaatcatctctgagtataggtaagcaatttactaatgataaacctatttcggctcttagcaaaaggtatactgtaactgccattaaaggcatcaaagtagaatgcttgtgatttgaggacagaattttaccttttttcctaccttgacagcattagtgtaggaagttgaaagctattataggatgccaataaactgctgttggccagtgatgtaatttgaacactggcacttctcactatgactcaccagagtctattgttttacctgtttttctcttttttttttcttttttagcagcaatccagaaaactttataaaatatggttgccaaattaaagaaccaaacttatagtgatataaataccagtcattcagactcacctttggaaagtggtggagaaaaaatttaataaactttttcaccactttaaaagaataaatacatgccctgaaaaacaaaattctcagtattgataagaaccaatctcatattattgaagtaaatctcatacagatactgttttcctttggttattttctattaatgttgaaatggaaattatatagcctgcatgtatttctctattttctctaaaataagaatgaaagattgcaaaaacaaggcctatttggagggtaagcctataatattctggaggagtcagatgctcacgtttagaaggtgaagtaaagtcaaaaagtaaatcaagataatatcagttactgcctgaaaaaaaagtttaattgtactttggagattttagtgcattgatcttttacaggagtataatttaggtttgaataagttgggccgaagtaaagtgattacagtgtactcattcaggagagaaagatgtgtgacatcttcacacatccttccacaatcctactccagatcaccatttttaacctttgttcacttccatggccatcctacaatgaaagggtagatctgtgttcaagattttaaagtttcaaaagctacacagagtaaatataagtaatacgaagctggatgggaaaccaatgagtgttgtgttagttgctgaatttgcagactatagtttacatttttaaaaaaggtcaagtgttatttcacaacagagtgcgaggggagttagaaacaaagttgatatatatgaattttgccaactgtacccaattaacaaatgctgtacatagtattctttaagctatgttcatgaataattcatgaaaacagctgctgctggaggtagatttgttttttctagcttatgaacacagtgtgatgcacacaaggaaattaatttactgttgctgtgctcaaaaactgattttcatatgagcatattcatcagcaccgtgaaaaacatctccctatgaactcattggtacatctctgattcattttgctctataatacttctgggataaagattcttgcgaggtatctgccatccacaaagtttgtcccttatcattgctttcatgttgactaaatcatctgattccagaaccttacacttccttttctaaccagtaggaaaattagcattgctgtccttttgtgaattgttttctcaattctcaatagaattctaccattttctttctagaaaccatgtttaagagttcaaaaaataatatgttaatttttaattagctacagagccccaaagttagaaagatccttaaaactgatctaatccaaactgccatctgttgaatggacatcttctgaaaactttattgttcaagatctatcagctcttgctactctatttcaaccataattctttttctagctatatacaaattttataactatttcatacattttagttattgttgaaaatattgaacagtgtaggaagttggatgacccttttaacagtcatttttatcactcttatgacaatttttctccaccttgtctgtgaagattatatgaaagtccttcaaaagcagaactgaaggacagattttattttcttagaggaaatttagaggcatacgagagtattatataaattaaaaatagaaagtaaaagtgagtgatcatagaaaatcattgtgtttcacttcacaccaaaccaaatgtaacaaatattttaccttttggaaaggttaagtagaaagtaagactccattaggtctcatgtatggttcatggaaagaaaagaaaataaggaaggaagaaaggaagggagatagggaggaaaggagggagggaggctggttctatattggttcttccagactacagctgttccatcccgatctattctgcttttgaccttacaggaacacagtattgtaggttttgaaccagtgataaaactgaggcccagtaacctggcccaatgattttttttttttcacgcattttgcagggaatagaatgtaatttaaaaccaggtctaaagtctacttcctttgcagggtgccacaataataacctagaaggataagcaatgtagataagataagcagatatgtcaactatttttagcctgaagctcataatattcaatgaaataaaaaataacaacaatgaaaaaaacatctatagtagcacttcttagggctatctgagttaattttagtggttgtgaactttgtatgaacttggtctctggtaagaacttgtctaatccatcaatagtgtcactaagatggaatgagtctgattgtcagttatttccgaggaggaactttacaatttctagtcttattcaatgttcaataaataaattattttctaaaaatctgtttcatcctgaattggattcatatattgaaacacatacattctttgctttttaaagtatcttttatcttacgattattcattccagaattacatgaaaaaataggacatcacatttgaattttaggacagagattcattgcatcacatctttcaacaatacaaaggaattatttggatttagatttatattctccagaagcttaggcatgagtataaatttggcataatatctctgtaatggccttacaataatgagttttactttacagtatgttggcaacagaacaattaaacatttctttatttgagtctttattttcttaaattttatcttcatttgtctccttttgatgaaaccaaaagaaaccataaatatgcattggcaattcacatgttttctatatatttgatattttagcatgtttacctctagagtctaagattattgtgtatttttaagtggaagaggtattcattctcataggacagctaattataattacttacctttcttggtcattacatcagcctctaagaattgaggtctttgacttaggtagtaaaaaatattttttatattttgtaggacagataattgatctgttctttcattttacatatgtgcaaatgtaaaattttaccaaaatattaaagattagcacttttatatttttagttttctagtaaatatttatatactataaatgaggctactgattttgacagattaaaattgctgcagcatttttgtttctactgtcatttaatttttactacagtcatggattgcttgatgacatgttctaagaaatgtgttgttaggcaattttgtctttgcgcaaacatcatacagtgtacttacacaaaccaaatggtatagcctacgacacacccaggcaatatggtgtagcctagtctatctaagctacaaacctgtacagcatgttactgtcctgaattgtgtacacagttgtaatgcaatgatatttgtatatctaaacatatctaaacatagtaaagatacagtaaaaatagagtatacaagataaaaaatggtatacatgtaaatagggaacttactatgaatggagcttgtaggactagaagttgccctggatctttaagtgaatgagtggtgattgaatgtgaagtcctaggacatggcagtactgtaaattttttttttttttttttttttttgagatggagtcttgctctgttgcctaggctggtgtgcagtggcgcgatctcggctcactggaacctctgcctctcggttcaagcaattctcctgcctcagcctcctgagtaattgggattacaggcatgtgccactatgctcggctaatttttgtatttttagtagacacaggatttcaccatgctggtcaagcttgtctcaaactcctgacctcgtgatccacctgcctaggcctcccaaagtgctgggattacagacgtgagtctctgcacccagccactgtagatattataaaaactctacacttagactacactaaatttattttaaacatttcctttttcaatatatactattttagcttactataaattttactttatgaactttttattctttttaaattttgacttgtttgtaataaaaacttaaaacacaaacacattgtccagctataaaaaatattttctttatacccttactcaaggatagacttttttctatttttatttattcattttactttttaaacttcttgtattaaaaactaagacacacacacacacacacacacacacacacactagcctaggcctccacagggtcaggattatcaatatcacttccatctccatatcttattccactggaaggtcttaaggggcaataacacacatggagctgtcatctcttgtaatagcaatgccttattcgggaatacccctggaggacctgcctgaggccattttacagttaactttataatgtataagtagaagaagtctactttaaaataatgataaaaagtatagtgtagtaaatatttaaaccagcaacatagtcatttgttatcattatcaagtactatgtactgtatataattgtatgtgctatgctttttcatgactggtagtacaggaaatttgtttacacaacaaaccacaaacatgtgaattatgtgttgtgttatgtgttgtgttgtgttatgtgttcactgggtgataggaatttttcagctccattataatctcatgggaccacctttatataatgcagtctgctgtcgagctcaaatgtcgttgtgctgtgcatgactgtgaatggtttaaaaataatgagtaacatgctgtaaaagctggatattattaaaaagtcattacaggacttgaattttaaaatcatattaacaaaaggatgtattattatatactattttaatttgtcctcatttatcttaacagcttcctctaccaagacaacatatatcagttacagcaatcattcaatctgaaacagggaaatggcacaatctgaagagatgtggtatatgatcttaaatgatgaacatgagaccgcaaaaattcactcctggagatctccgtagactacaatcaatcaaatcaatagtcagtcttgtaaggaacaaaaattagccatgagccaaaagtatcaataaacggggagtgaagaaacccgttttatacaataaaaccaatgagtgtcaagctaaagtattgcttattcatgagcagttaaaacaaatcacaaaaggaaaactaatgttagctcgtgaaaaaaaatgctgttgaaataaataatgtctgatgttattcttgtatttttctgtgattgtgagaactcccgttcctgtcccacattgtttaacttgtataagacaatgagtctgtttcttgtaatggctgaccagattgaagccctgggttgtgctaaaaataaatgcaatgattgatgcatgcaattttttatacaaataatttatttctaataataaaggaatgttttgcaaatgtt

SEQ ID NO: 546 - DNA, 2179 bp, Homo sapiens
agaaggttgtgaatccatgctaaaggtaaacaaactgcaacttatatctgcaatttattttggtatagacaagaggtatgccagtagcacactggtggcttcagaagaaattctcaacacctagctcgccagagagtctatgtatgggattgaacaatctgtaaactaaaggatcctaatcatgaaaataagtatgataaattataagtcactattggcactgttgtttatattagcctcctggatcatttttacagttttccagaactccacaaaggtttggtctgctctaaacttatccatctccctccattactggaacaactccacaaagtccttattccctaaaacaccactgatatcattaaagccactaacagagactgaactcagaataaaggaaatcatagagaaactagatcagcagatcccacccagacctttcacccacgtgaacaccaccaccagcgccacacatagcacagccaccatcctcaaccctcgagatacgtactgcaggggagaccagctgcacatcctgctggaggtgagggaccacttgggacgcaggaagcaatatggcggggatttcctgagggccaggatgtcttccccagcgctgatggcaggtgcttcaggaaaggtgactgacttcaacaacggcacctacctggtcagcttcactctgttctgggagggccaggtctctctgtctctgctgctcatccaccccagtgaaggggtgtcagctctctggagtgcaaggaaccaaggctatgacagggtgatcttcactggccagtttgtcaatggcacttcccaagtccactctgaatgtggcctgatcctaaacacaaatgctgaattgtgccagtacctggacaacagagaccaagaaggcttctactgtgtgaggcctcaacacatgccctgtgctgcactcactcacatgtattctaagaacaagaaagtttcttatcttagcaaacaagaaaagagcctctttgaaaggtcaaatgtgggtgtagagattatggaaaaattcaatacaattagtgtctccaaatgcaacaaagaaacagttgcaatgaaagagaaatgcaagtttggaatgacatccacaatccccagtgggcatgtctggagaaacacatggaatcctgtctcctgtagtttggctacagtcaaaatgaaggaatgcctgagaggaaaactcatatacctaatgggagattccacgatccgccagtggatggaatacttcaaagccagtatcaacacactgaagtcagtggatctgcatgaatctggaaaattgcaacaccagcttgctgtggatttggataggaacatcaacatccagtggcaaaaatattgttatcccttgataggatcaatgacctattcagtcaaagagatggagtacctcacccgggccattgacagaactggaggagaaaaaaatactgtcattgttatttccctgggccagcatttcagaccctttcccattgatgtttttatccgaagggccctcaatgtccacaaagccattcagcatcttcttctgagaagcccagacactatggttatcatcaaaacagaaaacatcagggagatgtacaatgatgcagaaagatttagtgactttcatggttacattcaatatctcatcataaaggacattttccaggatctcagtgtgagtatcattgatgcctgggatataacaattgcatatggcacaaataatgtacacccacctcaacatgtagtcggaaatcagattaatatattattaaactatatttgttaaataacacaaaagtctgaaattcattcacttaagtaaaaaaatttattgactgtctactagcaggccagatgctgtgtttggctctgaattcccaactagcaagagcagagaatctacattatggctgatccataagccaccaattcagctaaatgagatgtttctaatctgggcttccacttaaaaataaaactaaaaatactcatgaaaagagcctacccttcttgatcagagccatacccctcttcaccaatgggaagtcaagacacctatgggtaaaagttctctctgatgcatgaaaactcagagtgataaagtaattttaaaataaaaatttggagaaagcaaaaaaaaaaaaaaaaa

SEQ ID NO: 547 - DNA, 36878 bp, Homo sapiens
gactgggaagacatgaccttacacaccttggttctttaacttgaccttgggaagacagggccagccagcaaggtggctggggagaaggccgaggtccccgggccgcagacgggaattgagggtcaggagccgaagtgaaactggagccggcgccacgagatgcagccctgaagggcacctccacccagtggccctcccccaccccactcccggggccctcctggcccagcgtcaccctgctgcgctaggacctacaagggcggcctctgggagccctctgctttacctcctctcctgggtcaggctgcagaaagaacaagctcctccaccctgcctggtaggcatggaaggagggcaagtgttggtagccatggtaactcggggtagccatattttcgtgcagtcactctgaccccatctcgatggacaaggattgtcccatctgtttctacaactgtttcccaaacaggcagtgctgtcctaaggaagcacccacctggcccaaacatgctgtgctttctttgtggctgccttgcctccccaaccaattgtaaccccttggaatcaggactgtctcccgtgcgttttcttctctctgcagcctcgcctgcaaaggcttctgtgccttccctgagatgccctagcaaatgggtcttttcgaacattacccacctcaacgtaagtcctaggccaagccggttctctgcttattcagaacagagtgcgtctttactgtcatgccattacctggcaaagggaattgccggacggcaggtggcacagaattcctttggaactccaaattcttttttcagcttagtcttccctatgattctgacattttctacctgaaggcagaacacatgggttgagcttgggttctcagaatagaggggtggaaaccaaagcgggtctgcttgagaggattcatttttgagccttcttcccaacagagtatgtagccagccctgaagacaaaaacaaaagaaaggaatgagatcgaagtatctgttcccctggcttcctctgtgccagatcacagcctggcttagcactgttctgccaaaagccaccgatttggtcaggtgactgtgtcctgcaagtctcccccgatctattagccatgccctctccttgcctcttctcacctacctaggggtgaaaatggcctccaactacgcttagcttcaaggtgcttcacctcctctggtgatgtccttgcccctgcctcatctttgtaaatagtcccttttttaaactcgatattcctccttctgagaatgccatttcctagcagaaccctaactgacttttctttttcttcaactttactctcctttgatcctagaatcaactgcattcaccagagagtacctacaattgccagctagtgtgctaagcactggccatgcagagataagaggcacaggttacagtctgtggatatcttgggaggccagggctatgatggaggtcagctccaggtaggggcatggcggagagaggaagatgatcaagggaggcatcagagagtcagcagcagccaggcaaaggtcggaaggggcagagtgttccaggcaaggggtgtgtgccgagataggagcctaggtaggctggcattgctgagactgatgagaggtcagaccctagaggtacacagaagccaacatgtcccagtaggcagcctctggaggactttggcagggtggcaaatggccagattcccactgtggaaaggtcattctagcagaggcagacaggctaaatttggaggagacaagtttgggagcaggaaagccagtaggagtctactgcaggaatttaggtaaaacatagcaaaagcacaatccaaaataatacaggaggaaatggaatgcaggagataggtgaaggaattctcaggaaatagaacttgctggggcattgggtgtgactgggaggggaagaaatacgagtctggcaggactctcacatgcctggctggagcattcgtgggtttatggtggcattcccatgataagggaggggcaatatgttcttcctggaatttgttgagtttgaggtacctgtggtctaggcaaggaaaaatgcccatgaggaaaatggggatatgggtctgaagctcagaattgtctagactaaaggcatgcagttgatcatcattttcatgataggggaggaatggtataagcaaggagtatgctaagcttctgcttccgtgctttcggttgagaagtaggtcattgaacaataatgaaaatgctgaacatttcttgagtactgactacatggcaggcaatatacgaggtacttcatggtgaatactttgacttcatttattagaatcctcacagcaaccctatgaggccctgactagtgttttccccatttttgaactaggaaactaaggctcagagaagttcagaatttgtccaaggccacacagctagaaaatgtcataactgagatttgaatccagactttctgactcccggttcacctcagttacttgttctataaaaagattttatatttttgtccttcatgtagtttacccccaagaacaggtaagccttaaagatgagaccagaattaactgcccttttcctacaaactttcagctttcaaatctgtacctgttgatgagagaacctccaggtttgtcccctactaccaatgatgaggcaaacacagagagaggaacccctttgactaaagctgaattgtaaaggactaaagccctaacttctcttcgaatgacctgcattcaaatcaagtaagcagctgttcaaagaattcagtcggaggtatgacttgtgcagtgagagttgaaaacgcaaatcctgttctgtacctccctgtttaaagcattgcactggctcctcgttgccttcaggataaagtctatattccctccacatctccttccctactcctccagcattctgactggctgagccaactactcttaccccagtacagacaacctaactttgcagaactactcacaattcctaaacaccatcgaggatcaagcctctgcctttttcccttcaacattttactatgaaaattttcaaaaataaaattttaaaaatttacaagtgaatacttctctatctagacactaaaattaatattttcctgtatttgctttatcatgtatcaattcatttatccatcccatttttgtgcatttcaaagtaagtagtagatatctgcatacttacccctaaatgcttcagcatgcatattattaactagagttccaaatttgtttccagttctttttttctttcgtatgtaaaattaacatacaatgaaattttttcccattgtatgtaaaattaacatacaacgaaatgcacaaatattagaggcagtgtattagtatccttgctatggtaacaaatcaccacatacttagtgtctttaaatgacatacatttattctcttggaagtccaaaatcagtctggctgggccaaagtcaaggtgtaatcagggctggcttcttctggtatctctgaagggacaatctgtttccttgcctttttcaccttcgaaagcattccttggctcatgaccccttcctcacatcaccaacctcttgctttcatagttacctctcctactcactctgatcccctgccttcttcttataaagactgtgattacatcagttccacatggataacgcaggataatctcccatctcaagattcttagtttaatcgcatctgcagagtcctttttgccatgtgaaacaacatattcacagcttccaggaatcaggatgtgaccctcttggagagcaattattcagcctaccacatgcacatctaatgagtttttacaaatgcatacatttgtgtgactcaaactcccagcaagatagccttaccatcacccccagaacattctcatgccccttcccagtctgtcccagtctcaccctcaccccctagagccagccactgttctttttgcctcttcagaacttcctatagatggcgttatcttgcaaatacctggtatggtgtctggcatgtagtaagtgctcaggaaaggacttcatcttttgaatctgacttctcttacttgacacaatgtcctgaagactcatccatgctgcgtgtatcagtctcagtctgttccttttgattgcagagtaatattccatcaaataggccacaatcagatagttcccttattcatccattctcctgttgacagactccagactgcttccagtttttgtgcttttttgtttttgtacaaatctatggggtacatgagaaaacttgttacttatgtgtaatgtatagtgatcaagccagggtattccaggtgtccatcacccaagtacaatacattttgttaagtatggtcaccctcctctgctatcaaacattgaatttattccttctatctaactgtatatttatatgctttaacccacttctctttgttgatggctgctgtgaaacctcagttcttgtgttcctagtttaaaggaatttaaacaggagacacacagcaaaggagatgcagtgtagagcaatttattgcaaaggaggaagaataccctgaaagttaggtgcagaatagacaggatgccccaagagggattcagggtgggctgcctatgaggatgagatagcaaagacccacttgagggagactccctttatcgaaggcttacctgattattcatgagggggtgggaaactgtgttgctaggaagcatgttctgggatgggtgcacatgtgcagtacctgtacatgcttgttcatacattgcatgtgtcattagcaccctaaatctccaaccaggggtgttttttattattatattgagcaaagggtcagtctgaggacaggtaaaatcaaaatgtgcatgctctctacaggggaaattccctactggagacagctttgctgaatgagcttgactgcagtgcgaatgctggggcttattgtggtgactatgaggtcaccaaggttgccaaatcccaagggcatagtaacttccttgactaactgtcctgcctcatcttcatcctccccctttccccagactcacacttcccagtctctgttctttatctttccactctctacctccatctctgttctctatctttccactctctacctccatatgatcaaattttttagctcccacatataagtgagaatgtgtgatatttgcctttttgtgcctgacttatttcacttaagataatggcctccagttccatccatgttgctgcaaatgacatgtttcattcatataggcttgtcatatatggtctttgttattttaagtatgttccttttatagctagtttgttgagagtttttatgtaaattgtatcaatttttatcaaaaatttttatcagaaattttatcaaatactgtttctgcatttattgagatgatcatatggttttgtccttcattctgttgatgtgatgtatcccatttattgatttgtatatgttgaaccatctttccatccctggcataaatctcacttaatcatggtgtattatctttttttttgtttttttttttttgagacagagtcttgctctgtcccccaggctggagtgcagtggcacgatcttggctcactgcaacttccacctccctggttcaagcaattcccctgcctcagcctccagagtagctgggattacaggcacccaccaccacgcccagctaatctcacttttgttttggctgctcaacctctacttcttatctcacttcttgctcacttgccccttcaccttgcattgttagattgttaattttaatgtttctactttttgatggaacaatttattgctataaatttccctcttagcactgcttttacttttctcacaggttttggtatgttgtgtttccattttcatttctttcacggaactgtttttatttccatcttaatttcttattgacccaatggtcattcaggaacatgttgtctaatttccatgtatttgtgtagtttccaatgttccctccttgtattgatttctaattttattccattgtgctctaagaagataattgatatgattttgggaaatttgttgaggcttattttgaagcctaacatgtggtctatcctggagaatgtaccacgtgctgatgagaagaatgtatattctgtagttgttggatagaatgttctgcaaattgttaggtccctttgtctatagtgcagtttaaatctaatgtctctttgttgactttctgcctagatgatatatgtccaatgctgagagtgggggtcaatctttgtgcttcccaacctgctgctgaggttgctcctttggcctgtaataacctcaccactagcatctgttcccctcacaaagaatcagtcacccttgtcagcctcattatacccagtacaaaggccacctgctctgggaaacatttcccaaaccactgccccaccctgggtgactggaccactccctcctccatgccctgtacatacctcgctctctgcacctggcccttttatgacccttacttgtttacttgacccttacttgaggacatctgactctactcactctagttcatgccccccagggcacagccagggcatttcatatctgtgtctgcacagcaagggcagtatagtgtggtagggctgtgcagctctgaaagcactgccagggtgggttgagatcttggttctcatttcttttttttttttttttctttttgagatggattctcactctgttgcccaggatggagtgcagtggcacagtctcggctcactgcaggctccacccccgggttcacgccattctcctgcctcagcctcccgagtagctgggactacaggcgcccgccaccatgctcggctagtttttttgtgtttttagtagagacagggtttcaccatattagccaggatggtcttgatctcctgacctcctgatctgcctgcctcggcctcccaaagtgctgggattacaggcgtgagccaccgcgcccagccggttctcacttcttcatatgtaatctgatgaccctcacagggtcattgtgaggagtgaataaaatatacacgtgaagcacttagcacagtgccgggcacagaatctgcatctgattcaactggggcataaatggatgaaggaacttgttaaataatgacacaatggccgccttggattctttgcattctcgttggagtgagaaatctcctttttctgaaaactgacctgaatgtggaggacagacaagtagtgactcttggctctgcaatccatgagaagagctgctggcttatatccataacttattttgagttttattcaaggacacagaagtccacttcttcttggaggaaggacagaatttagtccaatgtctgagaagctttaataggctgccagggaaaagaattatgagctgcctctttctctgggacatatgtgccattgttttcctctcagcacaaagactttgctgtgccctggggtaggggctttgcttcactgtgaaactggctccaacatagaccttgagattgctaaatgttctcattctgagctaatctggagcctaaagaggttaacaatccagcaacaacgaagaagaatattttgatggaatttctccttgtctttgccatatattatatgccttttttcagagtacactattcatcaagaacttgagcttctcgaacactatattttggttatagacttttttattgcttttttatgattataaaaataaatacatgcccattggagaaagctgggaaaaatggaaaagtataacaaaaagacaaaaattacccataatttcacaccccagagataaccactgttaatatttttgtgtgatcttttcactagtgatagatagataaacaaataagtagactgacatacaaatgcattaggcacatttttcccacaagtggaaaaacaccaataattagatttcttggtccaacaagcctagttgtttgtttgtttgttttgttttgtttttgaaatggagtctcgctctgtcacccaggccggagtgcagtggctcaatcttggctcactgccacatcatcctcccgggttcaagtaattctcctgcctcagcctcctgagtagctggattacaggcacgcaccaccacgcccggctaatttttgtatttttagtagagacagggtttcatcatgttagcagtctggtctggaactcctgacctcgtgatccgcctgcctcagtctcccaaagtgctaggattacaggcatgagccaccacgcccagccacaggactagttttttacaggcttcaatgtgaccaaggtggactgaaggaaaagctatattgaagaaaactcctgaacctgccaactgggaaggtcccaagagtccagactgggtggtcatgtagaccctcatccttcacctgctcatcctgcctagttaagtgtttgcttagctcaactctcagaggcagcaaaggcagcaaatgagatggtgaattacaacccaaagcccaggcactggactgggcagtgtggtagggaggtgcagagattcaagtgaagacctacctgctcccccttccccttcctcctagatccctgtcaggtcctttcacctgagccttgattccatgtgactatgatagttggttgtttggttggtgcccatatttgtttgctagagctgccatagcaaagtaccacaactgggaggctgaaacgcacacatttatttatcacagttctggacgctggaagcctgagcccaaggcatctgcaaggttggttccctctgagacctctcctaggctcacggatgtctgtgttctgcctgtgttctcctcatcacatggtcatccctctgtgtgtgtttgtgttccaattacctcttctcataaagacaccagacatattggattaagactcatctaatgacctcatcttaacttaattacttctttatagaccctatttccaaatatagtcacattctgaggtactaggggtacgacttcaacatatgcattttgggggacacagttcagcccatgacagcgcctcactaggtgctggtgatacttgatcctgaccaggctgctccatcaacaagagtaatgagtggaaatttcagctccttagaaccaagtatttttaaaatgaaaaaaaaattgaacttaatgagaatttgctgtttaacttttaaaagtaaggcatatcacaacaccaatgacattcttcgcagaaataacaaaagtattcctggaatttgtatggaaacacacacaaaaaagaaacccaaaaagctgaaataagcaaaaagaacaaagctagaggcatcaaacttcctgacctcaaagtataatacaaagcaatagtaactaaaacagcgtggtactggcataaaaacagatgcataaaccaatggaacaggatagagagcccagaaataaatctacaccttcatagccacctgattttcaacagcagtgcgaagatagcacagtggaaaaaggacaattgcttcaatagaatggtgttagaaaaactggatatccacaaacagaaaaatgaaattacccccttatatctcaccatgttcaactcaaaatagattaaagacttaaatccaagacccaaaactattaaactactagaagaagacatagggggaaaactccacgacactggtctgggcaataatttttttataaaacgttaaaagcatggataacaaaagcaaaaagagccaaatgaaattacatcaaatttctaaaaatttactaaaaagcttctgcacaacaaaggaaacaaccaacagagcaaaaaagacaacctaaatagtgggagaaaatatttgcaaactatacatctgacaagcagttaatatccaaaatatataaggaaaccaaacaactcaatagcaaaataataataataataataataataataataataacccagtgaaaaattggcaaaagacttgagtagacattttgcaaaagaagacagacaaatggccaacaggtgtatgaagaaaagctcaacatcactaatcatcaggaaaatgcaaataaaaaaccacaaggagatatcacctcattattatggctattatcaaaaagacaaaagataacacttgccatcaaagctgtggagaaaagggaacatttatatattgttgctgggaatgcaaattagtacagccattatggaaaacagtatagaggttcctcaaaaaattaaaaacagaactacaatatgatccagcaaccccactactgggtatatattcaaaggaattgaaatcagtatgttgaagagatatctgcactcccatgtttattacagcactatgcacaataaccaaaatatggtatcaacctaaatgtccatcaaaggacaaatggatttaaaaaaatgagttgtatatatacacatggaataccacttatccataaaaaagaatgaaatctgccatttgtgataacaggatgaacttggaggacattctgtaagtgaaataagccaggcacagaaagataaataccgcatgatctcactcatcaagattcatgtggaatctaaaaaaacctgaactcaaagaagtagaagctaggctggttagaaaggagtggggagatggggagatgttggtcaaaggatacataattacagctagttaggaggaataaatttcaagagatctgttgtatagcaaggtgattatagttaatgacaatatattctcttcttgaaaaatgtagaaaatggacattaagtgctcttaccacaagagcgataacttatatgaagtaatgcatttgttaattagctaaatttaaccactctacaatgtatatgtatatcaaaacatcatgtttcacccaagaaaaacatacaagttatgtcaagtaaaaaaaaaaaaaagatgaaaaaaaaaaaagcaaagcagatttctctgagcaccatcagtgcctgcattgagttcttttttatcaatggagctgctccatgaatggctctgagtcttgcctgcacctcggaatcaactggggagcttttaaccccaccccctacaaacccaggcccccctatctaaatcagaatccggaggtgggacctctgggcaccaatagttaggaacactgcctgggtgattccaacatgcagccagcggggagaacaccccacaatggctctggtccagggcatgggtctttgggggctttgcaggggctccacggggcctccactgaggttccttaggatctgcatgactcccttcagtcagcacctcccaggcagtgaaatccggagaagggcttccaggctgtggctgcctcccttagaaaacaaaacctttatagaacagggacacagtgaaggactcaggacaaagcaggcagttggatgcttgtgagacccaggaatgttgtggagttcacgcctctgggcatcctgtgcccacatcagtcacagacaggaaaaaccaggagaagcagcatcatggcccattcccagagcaacagaaaagcccagggatcagtgaaactcagggagacattggtggcacaggaacctaagtgggatgagctgacctaataacccagaggcacagcctagccaagaccctgcttctgtggaaagttttggagccccgtggcagaggcctttctaccctgagtgctcacaaatctcctaagccaacaccagctcatcagctccttctgtcactcaagagaagccttgaatcacgtccataacaatgacaacctgctaaggcacttagatgctcatgctgggcaatgtccattcttctcctgcactgtgcagtcaacaccgtccctcaggtgacctggtggaagtccagcagaccagcttgagtgaggaacctcctcagtgtccaaagccaccagggtttccttccagtgtgccattaaaccccaagaggcaagaagctctcctgctggagactcacatccaaaatggggatcagacacagcacaagctgctccactaccccaggaccctacccatgagagaataaaacctcttccttctcaaattgggcataaggctcactgttcttaggtagctcgaaccctcattggctttgtatcctgagggtgctggaaaatcacttactaaggagatggagcaagggcttagtcaagacacctatgctgtagaaaacagggttcttctccagagactctgggtgcagctggcccaggacttggtgcagacaaagaacaattacagggatgtaattgttcaggatgtttcagagatgggtttctcgtttgaaaaacgcctttctcagaggattgttgggaaggtggaatgagataatgctcataaagcatttaaaacggggtctgtatctggagcagtgcagtgtatgttggcatggtggtcacagtcactcctctgtatgagctccataagtacaatcagatacactatctcagttttcctctctgtggttttgagcctgctcagagtgggcctggggtgcccttcatcaaataaacttctccagggcttgagggctcatcaaacccatcacatgctggggccactgggtagaaagtggggtctaagctttaagaagagacttccagtgcatagaattggcatttatacaggacaggttccaatggcttcaaatcagagatagcacaactattggggtgcaaaacatttttaagccccacaaaaagctaatttatcatactggagccctcacttctagaataagttataatgccattgagatggtaaaagatatactcagggtctaatagttgtttgaagatttttaaagttatgtaaaaatatttgcatgggccaggtgcggtggctcacgcctgtaatcctgacactttgggaggctgaggtgagaggatcacttgaggccaggagttcgagaccagcatggccaacatggtgaaaccccatctctactaaaaatacaaaaatcggctgggtgtggtggtgcatgcctgtaatcccagttactcaagaggctgaggcaggagaatagtttgaacccgggaggcagaggttgcagtgagctgagatggcgccactgtactccagcctgggtaacagactccatcgcaaaaaaaaaaaaaaaaaaaatttacacgaacacacacgtaagcatggcatgctccctgacacagtgagtcttttttctcaaacacacatcctagcatagacacaaaagcccttttccaggagcagatttagaagggctgcctatggcagtgaagggtgcagagaaagttgagggctcgggacataattcattagcagagaaaagttctcatttgcccccacaactgtttgaaagaaatgccccttgtaggtcttgatgctacctacacagggatgccatgcccttcgtgagattgctgcaggtttgggggccagaaaaacccaagttcaaatcctggctgtgccatttactagctgtgcaacttttgtgtcgtaggaacgatgcctactgtgcagagtcatctctaggattgaacaagtccccagcacaggagtgccagggccatcagtggatggcaggcgtgatcattgttcttcattccttagccaaacccagaatttctcaagttaatgtgaaagggaccctcctaactgcagagaataactgaccatggcctccatgtgtccccctgagtgtcacctgcctgcaaggcctgccttccattaacatggacacagggcacagcttcatttctccttagcacagttcacacagactgaaacttgtaaagccaaactttaccaaatcctagtggggcacaaatcaaatggagagcaaggctggaacctggcttgcagctctcaaagcttcatctcatgatgttctccaagcccagcccctcccagccctaagaccccaattctggggctggctactgacctaactacttgcctgggcctcatccatccctctactctggtagataatgtatgctaataccacgggttttttttccttgctatttataaaatcctaccacctttaatgaaaaaataagtccctaagctggagaaagagcccctggggtacaattctagtggtaagaagctgccaggctctcctgatttttcatgttactggttgcagcctgaaggtgcattttcaaatagcctgaaggcttcctctggtgctcacataggtgcaaatgtcaaccagccctttcaattttgtttcttcagtcctcaacctccctccagacccaggtgcggtgtcactgcaaaggggcatttggttttaaagaaattaccccctgtctagcactccttccttctgccaatggggagctgtagaagaggaaggggactaaaagagaaaatcataacaggaaggaattggagccagcaagggctaagctcagaaccagcatccaagactttggcctcagttacctgttacatttttgctgctgccaccagtctgcctggggcctctcttcctgatgcctgctgatacctggcctagcagctctcatcctatcaacctattcatctaacttcattccctgcaagggctagttcactgcccactgccctgtcctccctccccaaccttctcaacccaagccagtaccagctacataaattgcaaagcccagtataaagtgaaaatgtggggccccttgttcaaaagttaagaatctaaagacagcagcggagcgttaagccaagtagagagcccttctgagtgtgagacgtgggagactgcacagccgcatggccaggagccggtgctgactcagaccactcccagttgtccttggccttggcctaaggagcctgcgatgttgtataaagactcttcccttgagttgagagttaatagcatcctttgaaaccaggttacctagcatgtttttttcttaaaatgccacagggaaattaaaagttttctgacgtctaggtacctaacacctcttccatcttccttgtccatgtcatctgtttattaattcactccaaaacccaaaaatgagcagccactgtatcccatgcgctgtgttggtctctgtggttctgaataaattaagacagaatccctgacctcaaggaagccgtataagagacagacttgtgaacaaatagttataaagccatatgacacatgcaatgagggagatgggcaagtgccctggaaccagagaggacaagccagctatgtggaagatgtaaagagggtggggacagcaggggtagggggtagttggtgctgagccttgaagcaagagcttgctcccaaaataagaagacagaaaggcttgcagaaagggaacaaagccggcaaaggccaggtggccccagtgaacctggcatgatttgaaatagctcaagcacagggtgaggcagcattagtgtaccaagaacaaaaggaagattggggctaggctgtaaaaggtttttaatgccaaattaaatagtttatattttatccaataggcaactggaacccaccagagggaggaaggggacatggtcagatctatcttccagcaaaagcatgaagggcagattggaggtgctcaggaggagagtcagggcgtctggaggcaattgcagttttcaggccaaatcacaagggcttaaatgtagaccagaagttctcagcagggcagcagttttgcctcccaggaaatgactggtaatgtctgaagacatttttggttgtcctgatagggcggtggctgcttttggcctctagtgggttgaggccagagatgctgctagacgtcctactacacacaggacaggcccgtgagcatgatcaggctcaaactatcaatggtgccaaggttaaaaatccttgatgtagacaatgatagcaaagaccgtgaggctggaaagaaatccagagctatttaggaattagaacaggaagaacttcaaaaccagttagatactgacaaggagccaattgctatatcttgaaggaaattgtgcagtctttgtttgttgttgttgtggtggtggtggtggtggtggttgttgttttgagacagggtctcgctctgttgcccaggctggagtgcagtggcgcaatcacagctcacttcggcttcgacttcctaggttcattatgcttttgggttaatttcttaccagtggtatctgtgataaattacagattgacagggccacctcatcagtaaaggtggctggaagataccaccttggtgagtgagcaggtccaagccccgggctggttacaaagccagctggttctggaagttttgattcctgagatggccaacaacttactcacatgcagagggaaaataacacttagaaagaaaaataagagttttgaaaagagaggggggtgaatgaaaagcctttagggaaactggcttgttactaagacagatgtgaactaaacaagacagacgtgaactaaacaagacagacgtgaactaaacaagacagacatgaactaaatcaactctctgatcttatggagcaggggaaggggaaaagtcaaggagccctcacacacactcaccacatctcagggcccctggagtcctctgtattacccgcattcatacctccccaactgtaaccatcatcatcatcatagctaaccatgatcatcatcatcatagctaacatttattgagtgatttctatgtgtcaaaaacattagttaggtgctttacataccttttacctcatctgatgccaacaattttgtcacaccttcatatccattattgtgcctgtttcacaaatgagaaaactgagtgaggtttaaaaaattaactttttttttttttttttttttgagacagagtcttgctctgtcgcccaggctggagtgcagtggcgcaatctctgctcactgcaagctctgcctcccgggttcatgccattctcctgcctcagcctcccaagtaggtgggactacaggcgcccgccaccacacttggctaatttttttttgtatttttagtagagacggggtttcaccgtgttagccaggatggtctcgatctcatgacctcgtgatctgcctgcctcggcctcccaaagtgctgggattacaggcgtgagccacggcacccggccaaaaaattaacttctttaccctaggggcagggcaagatggcagaataaaggactccaccaaacatccccacccctacacaagaacaccaagtttgacaactatctactcaaaaggagcactttcataggaaccaaaaatcaggtgagcactcacagtgcctggttttgacttcaaattcctgagagaggcactgaggagggtgagaaggacagtcttgagttgctgatgccacccttcccccatcccctggcagtggctacatggcacagagaatctgtatatacacttgagagagggagaatgccatgactgtgaggctttgcattgaactcagtgctgctatgtcacagcggaaagcaaaactgagctatactcagctgacaccacggagggaacatgtggaccagccctggccagagggtactcacccagcccagcagtcagagcatgagttccagcaagcctcacccccattggctgcagtgctttgggaccctaagtgaacttgaggagcagtctacgcaacaaggactgcaattcctaggcaagacctagtgctgagctgggcttggagttagtgaactggtggggcacatgagacaccaactgtggtgtctaaggaagtgtttgcaccactccttccccaaccccaggcagcacagcacacagctccaaaagagaccccttccttctgcttgaggagagggaagagtaaagaggattttgtctcgcattttggataccagctcagccacagtatgttagggcactgataaaggctgtgaggcccccattccaggccctagctcccagacaacatttctggacacaccatgggccaagggagcccattgtcttgaaggatgagttcctatgcctggcaacattcaccacaagctgactgaagttcctttggtccttaactgagcatcagtggtagcctggcagtactccccacgggcctggtgaggctcctctgcctgtgagaatgggatgtaagaatgagaaggactgcatcctgtggtttgagttccagctcagctgcagtagaatagaacaacaggtagacttctaagattttagattcccatccatggctccagatggcatccctggacccactcaggacctaggggacctcaccaacctgaagggaaggatgtaagcctggctggcgtcaccacctttgctgattgtagagccctagggccttgagcaaataggcagtagccaggtagtggttacagcaggccttgggcaagacccagtgttgtgctgatactccatatccgacccagcacagtcccagtggcggtggccacaggggtgcttgtgttactctacccctggctccagacagctcaacacagagagagagactccatttgtttgggagaaagtaagggaagaaaaaagagtctctgcttggtaatccggagaattcttctggaccttatcaaagaccaccaacgtgatacctctacaagtgtgcaagaaccacggtgctactgggctaggggtgcccactaaagcagatacagcttagatcatagcacccaagtccttttgaatacctggaaactgttcccaaggaggacaggctcaaacaaactcagactgcaaacatggcaataaatacctaactttttaatgctcgaacactgacgaacatccacaagcatcaaagccatccaggaaaacaagacctcatcaaatgaactaaataaggcaccagggaccaacctggagaaacagagatatctgacctttcagacagagaattcaaaatagctgttttgaagatactcaaagaaattcaagataacacagagaaggaattcagaatcctgtcagaaaatttaacagagattgaaataattgaaaagaatcaaacagaaattctggagttgaaaatttcaattgacatactgaagaatgcgtcagagtctcttaatagcagaactgctcaagcagaagaaagaattagtgagaatagacaggctatttgaaattatatcgccagaagagacaaaaaaaatttttttttaatgaagcacacctacaggatctagaaaatagcctcaaaagggcagatctaagagttgttggccttaaagaggaggttgagaaagagatggggtagacagtttattcaaagggatagtaacagagaacttcccaaaactagagaaaagtatcaagatctgagtacaagaaggttatagaacaccaagcagattgaacccaaagaagaccacttcaaggcacttaataatcacactcccaaagggcaaggattttttttaaaaatgatcctaaaagcagcaagagaaaaaaaaaaaaaaaacaagtaacatacaatggaggtccaatacatttggcagcagactttttagtggaaatcttacaagccaggagatagtggcatgacatatttaaggtgctgaaggaaaaaacttttactctagaattatatatctggtgaaaatatccttcaaacatgaaggagaaatactttcccagacaaacaaaagctgaggaatttcatcaacaccagacctgtcctacaaaaaaatgctaaagggagtacttcaatcagaaagaaaaggatgttaatgagcaataagaaattatctaaagatacaaaactcacgggtattagtaagtacacagaaaaacacagaatacaacactgtaactgtggtgtgtaaactacttttaagtagaaagaccaaaatatgaaccaatcaaaaatcataacaacttttcaaaacatagacagtacggtaagatataaatggaaacatcaagagttaaaaagtgggggaaggcctcacatggtggcttctgcctataatcccacagggcacccctgtaatccaagcactttgggaggccagaggtaggcagattgcttgagctcaggaattcaagaccagcctggatgacatggcgaaaccccatctctacaaaatatacaaaaattaactggcatggtggctcacatctgtggtcccggctactttgggggctgaagtgggaggatcgcttgagccccagaggcggaggtggcagtgagctgagatcacgccatgcacctcacttcagcctagatacagagtgagatgctgtctcaaacaaaaaaaaaaaagaacaaaaagtaggggaacaaagataaagagaaagtctttattagtgttctttttgctttttagtttgcttgtttatgcaagtagtgttaagttgttatcaacttaatagattgtaagagtatttgcaagccctgtggtaatctcaaatcaaaaaacatacaacagatgcacaaaaattaaaaagcaagaaatcaaatcataccaccagagaaaatcaccgtctctaaaaggaaaagttaaccgcttttcccacataacatccaactaaaagaagtagaacctggattcaaactcaggccttctggctctatatcctgtaccagtaaccatgctgctatatttccttccaaaattgtgctcagcaaagggctgcacagaggcagtgactgttctggtgatttctgaagtcctacatgctacctccaatatgcacctggaatgtcatagtcaccaaaatggtttaacacaaatacatccctgcaccacacaaggtcacatgtctaccaacacaaattctttatttcaaagatcagcaacatattttaacttctgcttcctgattttctggcctcttgatttttttcttctttaagaatccaatgcacatttcgtgaggtagctactaaagagagccaggaggaaggaagaattctgctgtgtctactgcccagccccggctgccagacacagctgcagctggagggaggaatgtgggatttgacggggaagctgtcagctggccagcactgccaggcatggtcagtgaagatacaaagagcgcctggaggacccagccctggtctctgactcctcacaaaggtctccttggggctccctccacccttgcccctcatgtgccttgggatccagcatcaaagtccagaagtgggctcagccagcagccagccatgctcacacactgaagcatcctgactcagctcctggctgccccagcagagcagaacctctgcccgaacttggggtcacctggctcttctctctggagtctcatatcccagccctcagcaaatctcccccagcctcccttccagctacatccagaatgtggccacttctcatcacttccacccctgcaaccctgacctggcaaccagccttgccccccaagactattgcaaccaccccccggcctgctctctgctcctgccatcattgcagccttcactcttttgcattctgtctcccccagcacctccagatagcacttgctagaggcaggtcagttttggcctctgcacgaacctgacagaggcttcccaagtggctcagagtaaaatcccagtgacagccttggaggcgagggcgtttggtcactctctgaatccacctgccaccacttgcccctggcgacagcagtcccctcactctgcatcagggactttgcattccttgctccttcagcctgaaatgcccccgccaccaggcatccttgtggcccactccttcaccacattgaggagaagaggagtcccctttctgaaaggtcaggccctgcccccaccacatgcccctgctctgttttcccctgagcatgtgccccactggaacacactgggtcaccacttgccgccaacgcctgcaggacacctctctgaacacccgtgacacctcatggcacctctgctgtcagagcttcactaggactcaccagactaagcagacagttatacccacggccaacacacagcaaggacacagcggggtctggaggggtcagggcacagactcgctgagctctccctcccatgaaggctgcacagagcataccctgcgccctgcatctccccagggaagtagaagctcagagctggggcagaggttggggctggtcacgtaggcacactctctgcccaccacaactaacaagattccagattcccaataggaaagcaggtgttcactaatcacattgtctgtaaaaacagtcagcaggccggcacagcggggcaggatcctgaaagttaagttcccagatgccagcccagggccagcccctgtcatcagctgtcccagtgaggaggtctgctgtgaaggctcacaagcttcgctgttggatagtcttcactaaaatatgagccccatagaggctttggttttgtttgttcgttgctgtgtctccctggtgcagaatgagtgctccataaacatttgttgaatgaattaaggactgtcaagtataagcccaccagccagtggcagaagcagggctagcacctggagatgaacgttctcccctctctgggtggggctgcccaagccatcaggacctcaccagggccccttatgaccaatggccctgcctcagaaaatggtggaattttcttttttacaaacccaccttccctaatcagggacaaaagctatgatgttggcttcattcacataaagatctaatcgaatgagcttccctggtgtacccccagtaggtcctggtgcaggcgcgggttgctctgtttcttctctgtggtttcgtggaaacaatcccactctctagatcctctcaaattagctctgacaggttgtgactttctgaaagcaaaatatcaagatttagccacaggacatggtgagctgtgacctctggcttcctagctccacctttgtatatagcgctgcccctccttaggcctggacctccttaagaaaggcaagcagcgaacaactgacaggatacggtctttgcccaagtgctatctctaactgtcagcaatcattaattccacaagcgaggaaccacacctcagaaaccaaggtcaccttcagtatggaggggccagccccagccagggagcaggaagagaggtggcaaggcaacagaccccaaatttcaagtgtgacatctcaagttccccagccacagtgcacacaaacatgagcagaaacaatggccttggccagacatggtcactcatgcctgtaatcccggcactctgggaggccaaggcaggaggatcacttgaggccaggagttcaagaccagcgtgggcaacacagcatgaccccgtctctacaaatatatatatgtatataacaacagacttaccagcttttctgcacaaggattctgttcgcctcagctttcccagtgcctctctagagggcttctctatctcctctgtctctataggattcccacaagcccctcttcacccccacacttctctagaagcgcatagggaggttcctcactctacctcctccttccagacacaccacctgcccttcctcagcacagcgacacaaaccgcaccccactccccgcatcagccctgaccttttcccatgttgggaaacacaccacatctcagttcaggactctgctcctacccccactcacactcccactcccacccccgcccctgcccagtgtgtcctcttcctcctaagtccctcgtgtatcgcaaaaccccacacaggctctaccttgtggatcctcggggcagcagccccccagggcacagggcttggaattcactcactggccaaggaccatgctctctgcaatgaggcaggtaaagaaggtgtgctgggttgcatagcatccccctaaaaattcatgtcctccctggaacctcagaatatggtcttatttggaaatagggtcgttgcagatgaattagttaggatgatgtcatactggagtagggtaggccctcaatacaatcactggtgttcttgaaaatagaggtactgagacaaggaggacgccatgtgaggacagagattggagtgacatggccacaagccaaggcactgagggacaccaaggattgctggcaacacagaagctggaagaggagaggaaggaccctcttcttgagcctccaaagggagcatggccctgcctacaccttgatttcacactttaggcctccagaactgtgagacaacccatttctgttactttaagcccctgtgtgtggtcctctgtgacagcagccatggaggctactgcagaggggatagagtcccaggacttgggggcttgcagtcttgaggggaatctccttccaagcccttgcaggacaggcccttgggcatcaatgtgttgcacttactctgtgccaccttgtaatattaatccttctatgtacatgttatgggccccgttacataaaaaatgcaattctttctggtgtgcttcagctccctgcctacacgcagtgttcctccctgccctcactgcatcctccaggtgcgggacctgtggtggttcctgtcctcagccacatctaccctggtgtgaggacctgtagtcactcagtctgtctcccaggcctttcttttatttatttatggacgtccattgcagaactgaattaattctacctcagtgcatggatgtcgtcatcactggcccatacaagtcctctctcttgtctttctcacgtgtgtatgtatgtattcccactcccacccccgccctcacatccattctaatgtgtatccactcttgaaagcgggtggcttggtgtgtacgtgtttcctgttgtgtaatggcatcgtgctatcactcatcctgcgtcttccatgatcctgagatcccttctcaggagtggctgtgtggacatccatgcctttgcacccgccaactgcacaacaccccatggtgtgcagtgaccactctcctgggggtggcaccccgatggcctccagctccccagcctcacagccacttgtgtctgcatcccacctctaggcctgggtgagaacctctttgacatatattccaagagacagagttcctgagtctggagagcatgcaattctctcatttgcccacaccctgcaaagtgccctccagaatggctgtgccatcaataaccccttcccacaaccacacataaggtccccgtttccccacatctctgtcaacacttggcatcatccagctttcccatgaaaaattatatctcgttgttgaatgctttgcatttttctagtaaccactacatttgagcatctttccatgtgctctttagccctttggggtgcctcttctgcaagttacccttgggattctttaccaggtttccatggggactgctgcctctttctgaccgatttgcaagagctccttgtgtattctagatattagtcctgtcactttttgaaaacagctttattgagacacaccttacaattcacccatttaaagtgtataattcaatgcattttagtacattcacaggtacatgcagccatcaccttcaattttagaactttttaatcacctcaaaaagaaaccccataagcattagctctcaccccatccctccatcgcaccccagccctaagcaaccactaatgtgcttctcatctgcttgagagatttacctaccccacacgtttcatataaatggaataatgtggtcttttgtgactggcttctttcatttgccgtagtggttttaaggttcatccacattgtgtcatgtaacagtgattccttcctttttatgactgaatgatgttccattgagtggatagaccacattttgttgactcatttatcaatgcagagacatatgagtcgtctccactgtttggctattgtgaataacactgcagtaaacactctggtacaggtttccccatggacataggctttcctttctcttgagcatatacccaggagtgggattgctgggttatatgataacaacgttaagtcatttgaggaacagccagacagttttccgaagtggctgcgtcatctcaccatgaactgcctgtgaggcttccagtttctctgcctcctggccccacctgttattaccttgcttttgaattctagccatcctagtggatataaagtggtatctcctggtggttttgatttgcatcccctgatgactaatgacattgaacagctttccatgtgcatattggccatttgtgtatcttcgtgaggggaatatctattcagatctttggctcatttttaattggattatttgcctcttattatggaattggaagagttcttcttacattctagatataattttcttatcagatatataatctgtgaatattttctcccattctatgctttgtcttttcattttcctgtgggtgtcctttgaagcataaaagtcttttaatactgatgatgtcaatttatctatttttttttctttggttatttgtgctttgaggtcacatccaagaattagatgtaaagtcaagcagatttactcctatgttttctttttaagagttttacagttttagctcttacatgtatgtctttggtccctttcgagtccgtttccgtgtgtgaaagggtctaactccatcatgtgcatgtggcccctttccctttaaatctttgcaagtctcttttctcgatccatcctcactccattaactttgtcgcagtttcctttgtggaatggaaacagattgtagtcctcaaaatcaggttgttcctgaaactctcttctaatccaaatccccccaattctctgcggagttggtgagcccataactgagaatacataactcacagtcctcttgaacactgagggtgaaagacgttagcattcattgtctttgtatcaatcatcattttaacatggaaggcaaatccccttcctcagaaacaccaaagaccttctggaattgcaagcaagcttcaagttgactaagtgtgttcaccttccttcatctagctgccagtgcacactgaaatggcttgcattgcgggcagcaggaaggatgatgatgagaaatacaaaacccctataaccacaaagcggtgtgcaatccctgagcaaccaaaccttggtaatgggggatgatgaccccttggcactcctgagccacgaacttttcctgactctattctttcctttccaactaggagttaccccggtcaccacgttcgcccttctcaacctgactaagtgggcgttagcactgtccgcccactgcatgggcactacctgccccagtgtcctctcccctctccgctctgtgccatagccttagctaccctggccagctttctcccagccaagtccttcctcctttctgaatctggtcagggtctcaaagatcgttaaaaagccgccaaagtttgcaactcgtcttgagtggctgctcctcccaaacggttctgcctctggtgtcttgttctaggagcggttgaattctctgttttgctgtgggtgccagcctctatcagcccctgccctggtccatctgtcagcttcaggtaagactaccggctaggaaatggccccttgtccttatctctgcctctaaaatatgccacctaaattaacagatcgtggcattgcatggctcgtcacagagaagccaaggcaaattcttgtggaaggcggcacttgtctggaaacagactcaggacaagtgtgctgcacagccagcttcctcaaacccactctcgccactgtagctgcccacagaggcacctcccaagccataggcccctcctaggccagctcaggcctcaccttgtccctccctgcagggcggggtctgattgacttcaagaaggagtcagagatcagcttaagggcaaaggctggaagcagagcgaactgggagcagagcacacaggtgcgttctgatgggtattcgggagagtcaagaaggggctgacctggaggacagaaaagcagtggaaggagggcacagagtgaggggcagaagaaacaggacacagagggaggagggccaggaagtgagggcgggagcccagcacatcacagaaggtgcccgggtgcttggtggcaggcaacagccggccagggtggagtggggaaagctcagagaggagggtgagcagggagagggcttgcttcctgttcctgcctggaggtctcaccagccaccacccccactgccactgcacatggggacagaggtttgtcctggggaaagcaaaggtctcttccacatctttctccttcctggaaaagcaaaaagaaacgtgggtataagaggttgtaaaaaaggagacccagccgtgaaaggacatggaggtaccctaaatgcacactgccaagcaaaagaagccaatctgaaaaggctgcagactgtaagattccaaatacaggacgttctggaaaaggcaaaactatggagacaataaaaagagcagtgattgctagggtttcggaggaagaggtggagcacagaagattttgggggaggtggaactattctgtgtgatattctaatggtggatccatgtcattgtccgtttgtccaacccatagaatatgcagcagcaagagtgagtcctgatgtaaactgtgggctctgggtgagagtgatgtgcaggttcatcagccacaaatgtatggctctggtgtggatattgatagtggggaggctgcgtgtgtaggggctgtgagtatacagaaactctcagtacctttcgctcaattttgctatgaacctaaaattcctctttaaaagactcctatttaaaagactttaatagactttataaagtttgttaaaagacttttaatagactttttaaagacttttaacagactttataaagtctattaagaaatctattaaagtctatttttaaaagtctattaaaaaaaaagtctactataatcccagcactttgggaggccaacgcaggaggatcacttgagcccaggagttcaagaccagcctgggcaacatagtgagatcctgactatatatatatatatatatatatatatatatatatatttatttatttatttatttaagtctaataagaagtctatttggggccaggcctggtggctcatgcctgtaatcccagcactttgggaggctgaggcaggtggaccacttgaggtcaggaattcaagaccagcctgaccaacacggtgaaacaccatctctactaaaaacaaaaaattagccgggcatggtggtgcacacctgtaatcccaactattccagaggctgaggcaggagaattgcttgaacctgggaggcagaggtagcagtgagccaagatcgcatcactgcactccagcctgggctacagagcaagactgtctcaggaaaaagaaaaaatagtctatttaaagaagaaaaaaaagaggcctggccaatatttaataggagaacacaagaactcacctcatatccttcctgctggctctgggttccgcctgcagcccctgcctcacctgctccctccaggtaagcagggcctccgagagcccaagatcatgtgggttccagggtcttctgccagcaccagagggcaagacaaggcaactagagggacatccccatgagaggccatgaccatggagcaaaacgagggcaaggggagagccctcggggagaggggcatgggaaagggagagaaggacatctcagatcagcctttaccgtggcctccagggctagagagccctcgggtgatggaacaggcccagccaacacctttcatttgtctatgaatcaagaactgcccatcgtgtacaaattaaatacaaagtgctaaggggactagtggagaagtatgttagttggggccaaaaacagcattcctcggcagtgcggggtttcagctgacctcaaaaggtggcaaaggatgtgacactggcccagagtcgggtgggaagggacaatgtgcagctgagcttctctggaggaaaaaagccacgggaaaacagggcctctagttaacacatgggttgtgttcccaacgcttgtgcttcggaaatgtgatgtgtaaatgcattttccaaaaacaaaagcaagaaatgaaaagcgctcatgatggtcaggtttcctcagtgggtcactccacgatacacccaaagtggagctgctgcacctcagttacacctcacaccctgtgccgccgactttccaggtgaaatcctcggggcctcccttgcaggcagcctgggccccctgggaagaggctgggccaggcagaggtctgagacaggagtggattaaccctctctgctacctgtctgtctgcacaggagaacgagttttctccaggtttacccccagggcttctgatttagggagcaaaaggcaactacctatgaaaatatgaaaacaaggatctctcagagtccaacccactcatgcatccaccttataaatcaagtgtctgtgcctcaggcactgcttgcaggaagtgaaaagcacagctgagacagggaggaatcctgaagcggggctcccagctcaacccagagccttgaggaagggggtgcaaggtggcaaaggcagtgcttctgtagggaaatttcacggtgacggcagccttccagggaggcccacatcacctaggaggacaagttagggtctggagaaactaaggctgggagacagctccagccagcatctgtagcaacagcgcaacaggcaagagtaacagtctcccagagactccgcacacagcacatgggaagacagagctgtggccaccacgtctcccagccctgcaggaggctcacagctacaagcacaggattttacagctgcttggggaatggggttatgaggtgaagaccctgacccaccctccctgagaaaggaaaaggcatcttcctaagatgaaaccctccctgaggtcccctcctagtagccttgggtggacaagagaggtgaatggggcacaaagaaggctaggcaggactgggcacctctacctcacccccaaagccatcagtctgcagcctagtcacacctgaatcactctacattgcgtaaaactttaaatgggctggtgtcgatagcctgtatttaacaagaagagcagctaacatttctcatgtatttcccatatggcagacattgttacaaacactttatatttactgtttaattgatttctctccacaaccctaggagctaagcactgttgtcattattttcattttaaaactaagaacatgaaggcccagagagtttaagcagcgtgcccaaggccacacagcaagtcctagtggcatgagtcactgggacttgactcagacagcctgactctagagcctacctttgaatttctacactaaatttcaaaatctgtctacctaaaaggtatttcgttgtgtcagaaatgtagttttgctgttaatacaggtgtcttcttctccaggacacaagaagcacctgggggcatgtgcaggggcccagcctggcctctgtgactcacggcacccctggctgagataatacacaaaaacaagggtgttcccctgagtaaggaaggctgcaggactgaaggacatttacagaggagtgaggagagggcagaaataaatggatggatgcacaggcagcggcccgacggcgctggggactatgcatggggccccagctgccccaggacagcctccagcttggggcagggcaaggggaggaagctcagtccatgggaaaattccatggccctaacctgagggaagcccatctctgcccataagacaactaagttcatctcctctattgcattccagagccgtggagcgagagatgccggccctgggctgggccgtggctgccatcctgatgctgcagacggccatggcggagccctccccggggactctgcccaggaaggcaggggtgttttcagacctaagcaaccaagagctgaaggcagtgcacagcttcctctggtccaagaaggagctgaggctgcagccctccagtaccaccaccatggccaagaacaccgtgtttctcatcgagatgctgctgcccaagaagtaccatgtgctgaggtttctggataaaggtgaaaggcatcctgtgcgggaagcccgtgccgtcatcttctttggtgaccaggagcatcccaatgtcaccgagtttgctgtggggcccctgccagggccctgctacatgcgagcactgtcccccaggcctgggtaccagtcctcctgggcatcgaggcccatctccacagcagagtatgccctcctctaccacaccctgcaggaagccaccaagcccctgcatcagttcttcctcaataccacaggcttctcattccaagactgccatgacagatgcctggccttcaccgatgtggccccccggggtgtggcttctggccagcgccgcagttggcttatcatacagcgctatgtagaaggctactttctgcaccccactgggctggagctcctcgtggatcatgggagcacagatgctgggcactgggccgtggagcaggtgtggtacaacgggaagttctatgggagcccagaggaactggctcggaagtatgcagatggagaggtggacgtggtggtcctggaggacccgctgcctgggggcaaggggcatgacagcacagaggagccgcccctcttctcctcccacaagccccgcggggacttccccagccccatccatgtgagcggcccccgcttggtccagccccacggccctcgcttcaggctggagggcaacgctgtgctctacggcggctggagctttgccttccggctgcgctcctcctccgggctgcaggtcctgaacgtgcacttcggcggagagcgcattgcctatgaggtcagcgtgcaagaggcagtggcgctgtatggaggacacacacctgcaggcatgcagaccaagtacctcgatgtcggctggggcctgggcagcgtcactcatgagttagcccccggcatcgactgcccggagaccgccaccttcctggacactttccactactatgatgccgatgacccggtccattatccccgagccctctgcctctttgaaatgcccacaggggtgccccttcggcggcactttaattccaactttaaaggtggcttcaacttctatgcggggctgaagggccaggtgctggtgctgcggacaacttcaactgtctacaattatgattacatttgggactttatcttctaccccaacggggtgatggaggccaagatgcatgccactggctacgtccacgccaccttctacacccccgaggggctgcgccacggcactcgcctgcacacccacctgattggcaacatacacactcacttggtgcactaccgcgtagacctggatgtggcaggtaggactcaaagcgagactctcccgttcaaacatctgcatccagccaataacttaaactcccaggagacggcactataactccctggtggtggaaagttaggagcatttgccaagcctgcttctgtaaaacctaaagctagaaatttgtgtgtccctgaaaaatggtgaaagcgaacagtgccgagggttgccctggatgcaacagtgtggaccctgtcctgaccctggggctgtgcatggggcaagggaggggacggtgcctatgagggtaagaaatgtcactgtctagcgctttgagatggagtgtagtattgtctgggaatattcagggtgtctcctggatgatatcaccataaaagaatggcatgggtagaataactaatgctgccagacccaacaaggccaccaggaccacacgggcggctcctacccctcagccccagtcacctctctggacagagcctcccatgcctggagaaaaatgggtgcccctgctctaggattgcagccacagcagatgggcatgagcacagctcttgagaggaacttcccagagtggtaatggaatcaccacagccgcccagggcatcccccaacatcccggttattcaagacagttggctgttggatgtggtggaggatggagatcctggggtagaatgaggaggtttcagttctggcagcttgattctcgttctccttctccctgcatacctccaggcaccaagaacagcttccagacactgcagatgaagctagaaaacatcaccaacccctggagcccaagacaccgcgtggtccagccaactctggagcagacgcagtactcctgggagcgccaggcggccttccgcttcaaaaggaagctgcctaagtacctgctctttaccagcccccaggagaacccctggggccacaagcgcacgtaccgcctgcagatccactccatggccgaccaggtgctgcccccaggctggcaggaggagcaggccatcacctgggcaaggtgaggaagacccagggggcctgggggagggtcagtggcttccctcagtgtgtgtgtctgtgtctgtctgtgtttgtgtctatggggttcctagtctatgtggatatacacatatacgtatgtgtatatctgtgtgtacaattgaccctgaacaatatggggggtaggggtgccaaccccccaaagcagtaaagaagccaagtgtaactatgactcccccacaacgtaactacgaatagcctactgttaaccggaagccttaccactaacagaaacattccgtgaacacatattttgtaggttctgtgtgtcagatactgtgttcttacaataaagtaagctagagaaaagaaaatgttattaataaaatcctggccgggcacggtggctcacgcctgtaatcccagcactttgggaagctgaggcagacagatcacgaggtcaggagatcaagaccatcctggctaacacggtgaaacctcatctctactaaaaacacaaaaaattagctgggcatggtggcaggcacctgtagtcccagctacttgggaggctgaggcaggagaatggcgtgaacccgggaggcggagcttgcagtgagccgagatcacaccactgcactccagtctgggcaacagagcaagactagttctcaaaaaaaaaaaaaaaaaaatcctaaggaaaagaaaatatatctacaatccattaagtgggagtggctcatcccaaaggtctttatcctcgtctccttcactttaagtgggctgaggaagaggaggaggaggggctggtcttgctgtctcacggtggcagaggcggaagaaactccaaatgaaagtggacttgtgtgctgggcgcaggagctcacgcctgtaatcccagcactttgggaggccaaggtgggcagatcacctgaggtcaggagttcgagaccagcctggccaacacagcgaaaccctgtctctactaaagatacaaaagttagccgggtgtggtcgtgggcgcctgtaatcccagctactcgggaggctgaggcaggagaatcacttgaacctgggaggcagaggttgcagtgagccaagatcgcatcactgcactccagcctgggtgacagagcaaaactccatcaaaaaaaaagaaaaagaaaagaaaagaaggaaggaaagagagagaaagaggacccatgcagctcacacctgtgttgtgcaagggttgcctgctgttctgggcctgtgtctctgtgcatttggggaggggggcggggaggactcctgtgggtcacctgaacccggttaacagcagcccgtcctgctgactcccaggacagatgatctgtcatcttggggaaggcaatcatcttcctctattctgaccctgaggctgttccctgggcaggactgaggggggccagcccagggccctgagccaagctgcttcgcctgtgcctggcaggtaccccctggcagtgaccaagtaccgggagtcggagctgtgcagcagcagcatctaccaccagaacgacccctggcacccgcccgtggtctttgagcagtttcttcacaacaacgagaacattgaaaatgaggtactgccctgtccccagccctgcccggtgctggccctgcctccttccagctcagcccaggaccatcctcatcaccatcagggagtcccaaccaccctttgcccagatctgtccccagtcgcaggagctgtgccttgctgtgtggacggcaagttcagaggtcacaacagagctgctcatctctttaaaaaggggctggagaggaattcagcaagtttccaggcagaactgaaaatgaccaaaggctagagtggcctccagtggtcagtactcagccctgcccactgaagcccaccctgtctcctgcaggacctggtggcctgggtgacggtgggcttcctgcacatcccccactcagaggacattcccaacacagccacacctgggaactccgtgggcttcctgctccggccattcaacttcttcccagaggacccctccctggcatccagagacactgtgatcgtgtggcctcgggacaacggccccaactacgtccagcgctggatccctgaggacagggactgctcgatgcctcccccttttagctacaatgggacctatagacctgtgtgaccagcccccagttcctcccccagttcctcccaggaagcccaggagcctcactggggcagacaataaaccctcagagcctcgctctgtgtgctgcttcttgcggggaggcacagggccatgtgtgtaggaaacacacgaacagacgtgcacacacacagacgtgcacacacacacagacatgcacacacacacagacgtgcacacacacagacgtgcacgcactcacacggacatgcacacacatggcatgtactttattcacactggtctactgcagtccagaaaagccaccatt

SEQ ID NO: 548 - DNA, 3819 bp, Homo sapiens
agctgacgaaggcgccgtcgccgttgcccagagggaaggcgggctgcagagccacgggccgggcgtcggagcggcagaacttgggtgccaagctgagcacgtcgccgccgaccccgccgctgctgctgcatgacacgtactccagatctggggacccttcacctgcctctactactgcaaatgattggatattcgtctgacttggctcttccctaatgtgtggaactaattttgttcactctgtttcatgctggacctggcctgaaaatgggcccttatattgtctttgcactttccaacttgccaagtttctgaaagaaggaccaaagtaatgccaagaactcccagatgaagaggaccttccttagacctataacagattcactacttgacttcagagggaagtttcagctaattctcaggaaaaggtcaaaacaggcctgtgactgtcccttgaatactgaaggtataaacaagcttctggctcctccaggtcaagcagaggaacacttttattagaatgaagggttacttctttgttattcaaacacacacccacacacatcctctgtagtctccctaatgaaaaacctcaacagatggagagcctgagctcccaagtccgcaggctgagaagatgcacttcactcaagggccagtgggctggtacagactagggaagagaaaagggacaaaggctgctagtataggtaatcactatcttttaatactcctaacacatagaaattcgaaaaatcttgttcagcaatgttagcagcctgtgagcctcggaaactaatttggctgatgtgtctctgatagggagcttggggctgcaccaaggggaaacattctcctcctgtattctctcctctctctcgtttgaaagcctgtacaaagaaatggtacaaatggatggttaacttaatgattccatcagaggcagatttttctctgtcaggtccctggataaggtggaggtctgaaagccaggagacagaatatgtacttaatcgccctttctgacctgcttaccagtgaccaggactactctccaggcctttcttctgccacttccccattcttcctggctagttcagttgggtctcagcacttcaactcctggctggatcctgagtttttcttggttgcagggaaagctctcactgtctgcatctccttccccacccccacctcccgttttgcagctggccattctggctgcctcacagctatcctgccttaattcatatttgattgcctggacagaaccacctagaatgtccagacgactgccacccctcagccatgggcctgagatcctgccctgacccctttcttcagaccccaggaggacccacaatctccctgatccccaccttccccaaagtagtctctaggaaaaaagcagagctggctaaggcctgagacagagccatttcttccccttgggcaaacgaggtagaccctcccagagaccaatgccggagaggcccggatccgagctccctttatatggcctcccccatcacggatcccgtgggaaaacctgacacacaatggcgcggctgctccgggcaccctcaacccagcgccctgcggcaaggcctggagcagcctggtggtcttggtgcgctccctttgccctccccgcaaccctctgcgagcactcgtcccaggagagagaccctggctagggtggaggttgcctcccgcaaagggcgctgttgctggggcctcccctcccccattctcttgtttttctgcttctgagactcgggagggaggcggcaggcgcctccgcagccgatagagcagctattgtgaccttcccttgcagagcgggaacccagccgagtgtgtaccgccggcggtggcgggggaggaggcgactgtgtgtgcaaacctcagtcggagagggggtggcgctgggaaataaaggtttgcaacctcaggcagttgggcccttcagagggcgtttggttgtgtttagactcggttgctttctaacactaattgcaggctcaaaaggagcggaatttattgcgaaggccaaggcggcttgtttataatttatgaagttttaaatggctgtgccgcgggccccaactttctcctgggctggcagccgcgcggaaacgcgccctcccccggctcgccgcccacccccacccacgcccctcagatgagtctcacgccaatggcaggaacagatccgagctattagaagtctcgggaacctccagagatgacagaaggtggcagatttggtccaagccctcaccccactcgagaggagggcgtcggggaaagctgtggctgcctggagagggagcccctgatcccacacttccttggagcctgagtgtgagaggaagctaatgtcagccgggctagacaccgtttaaagtctaatccatgaaaccctaagccgcaaatgacacttggggctttgcagacacccgcagactcagcagatactcctgcggtaacacactgtgctggaaaacgcctggagccatgacacattacgtatttttattattatttatggtaggaagaggagatgagggaaaatcgggctgaatctaagcagcctgacaattcagctagttaatatttagccagttaagaaaggtggttgtaatccctgcaaggcagtgagctctcctttgatttctctaatagcttaaaaaataatttcttacaagacaattagaaattctgcctatggatgcaaatttcatagaaaacaatgttaagccttgaaagtgggtaaaatgtgccttcgattgaagtcatttattctgttgatacacttctacaacatatatattttaaacctgctcagataaagtgaaatttagcaaaaggatatcccctcccacccccaaatctaacatgccattttaaaaacagcacaaaggaacaaggaaactaaatattattttgagccatcattacttagtgaaatacaaacatccaaatagaaacgattgttgttccaccagaagattagaagttaaattatttccacacaataggaatttcacttcgtgtcatcggggatgtagtaggagttgcattatttgtcaaaccaaatagagatgcgtgggctgactttgctgaaatacaaaagaattgaaccttatctgaaggcgttttctaagtggcccctcccatagaagccgggaagttgtccacccctagcagaagccacattaatatttacaaaatggttataaatccttgaagacatttttgcccattttgtataagaaacaggagtaaacaaggtgtttatacttgttatgtttcattaatgaaatattattactttacatcttggggaatgtttgttttctttagaaatgaactaatgatcactacaaaggaagaattcatgacagcatttcctagagaaaaagcttaggtacgcgtctccaaatgatggtttctttttctacaccttagctttttcatagctcaattcttcttacaacttctcttgtgttttttctttgattgtcagttttctttcaaagtttattttttgttacttaatgcagaaaagtgagctctggtctccccagtgtaaaagtcgattgtgtctagaaagaaggcagtaaaaacagcaaagcaggcgctgctttcaaaaagccctgcccaaatcatcccgcccagaaccttcttaggtttgcatcctcatttccccctcccctaatttcaatagctggaaagtaatcaagtatcccgagaaccaatttatgcactagactccaaataaataaaatatttttttcaaaaaaaaaaaaaaaa

SEQ ID NO: 549 - DNA, 23902 bp, Homo sapiens
agatcaacaactgtcagctcccagtcagagagaaagggcctcttcagtctgtctcaggagactgggagaaacagcataaaggaccccacaaggaagggagaggtaccctgggtcaggcgcttgtggagagagggcttcgcatgtaaagtgacgtcagggaaaatagaacagaaaaaaagccagggccagcccagaggcacctgagaagaatcagacccacagctcagcccagccctggcacagagaagagacaggcctggcagcacccagggaccccctttcctcagcctccacctgcaggacagcaggagcactgatgcgctgaaggtacgttctggagtctggaagcagcagaactgaaggaagtaaacacgggtgtctgggaagacccctcaagctgcagtaaagcccaggactgaattggccacctgaggccaagggtggcactccaacctcctcctaaaggctggctagagccacaggaaagggccagaagccagagaaagggcaaaggtggacccctgcctccaaacctcctctggagactgacctcctctttcctgtgccttattgtttctccctcttctctttgttcgccactgggcggtgacctcagggatcctggcctaacctggtgattgtgcaggcaactgtgtccgagaagacccttctctggaagattgaaccccaattcagccatggtgactcctttgatgtcaaactggtaagggctgagccgtgggcacaggataccactccttccagctcttctgctgtgacctgcccatggaagtccctgtggacacgaaatcctgtttggatcatctaactggaggctctctgttcttcacctccacgcgccctcttgaccccaggaggttcaggggaggaagtacgccactctccactggcaccctccttggcctacacagagtcacccctgagcccctcaatgtgtgctgaggtgggccctgctctctgcaggggtatggagagaaatagcttggggtgctgtgaggccccgaagaagctgagcctgtccttctccattgaggcgatcctaaagaggcctgccaggaggagtgatatggacagaccagaagggccaggtgaagagggccccggagaagctgcggcctcaggctctgggctagaaaagcctccaaaggaccagccccagggtaagtgtcttctgatcatttctttctgtttcctggtctccaagacccagctgggctcaggcagagaaaaagcttctccgtccatattaactggatagaggactctaaaattcagagcaagacctggctctgggctggtttcctgatatacctttcaatctaacccaaaactgtgcttttcagcttcagacaccaaggctcagttagttgcagaatgcagggacctggggcttgttattgtaaccaggccccggctaagaatgctagttaccatttattcagcattgacaatgtcataggcattctcttttaatttcagtagaaaagcatgattatcataactggacagataagaaaactcatctgtgaaagagaagaggaggataatgtccccaagttacacagctggtaaacagaagccccgctatcaggacctggctctgactcccccaaatccctgctgggcccagcacagtctcctcctcataagccaagttcagtctgcacaacttccaggggctgaagctttgcccaggggccgaagctttggcttgggaaaagtctgtccaccctgatcaccttccccaagccagtggccaccccaaggcatgtccccagataacagtgaccaggtagatcgagagctggcttgaggaagggaggaaagccgcactggggcattggtgtggacgcacacacctgctaacagtcaggaacccaggatgtgagtcttagctctaccttggcctgctatgtgacctcagaaaagtccctgtccactgcagcctcaggtttattctcagcaaaacacctgggtgaaggaataagaaatggtgaagctggcgatgtctcaagggccttgtcagtctgactgtcactgagcctggaatatctcacatgaggttctcagttctctccccttttcaccccttttaatcccagaaaatgctggaaaggaagctcagggagcccttaatgtcattacctgccataaatagagctccacatccccaccaacgaggcaagtctcccatggagggagctgatgaggggtcgcactcagctgcaggcatgaggaagaccaggagggctgtgtgtctgcaggcaggaaggagcctggtgtgtttccctatagctgagttttccaaagggaaagggtctctagcttaatttttggaagttcattaatatcttccagtccattaaagattcataggaacatttccattggggtcctgagtctctcctcctgcagttgtacaaatctatgatcaccctgtgtcatgagagagaggtctcgcttttcctaccagagaagcttcccttcccctagcccgatgacggcaggcttcagaaaggaaaccactctttctaggcctccacggaagattctggcatgttccgtgtcagctatccatctggtcccagaacagaccccagtaagtgctgaccagactagcggtggtgacatcggatggtggtatattccttccacagcacttttgtggccattttcccatctcactgtcacacttgggagcccaacttacagatgatgaaaccaagaagagaagataaatcccccacaaaaactatgtgagtaatgagcactagaattgaaccctggtggccttagaccatctactctagattattcctgaacttagtttaaatccatccgtctcccactatgctggaattcggcatttctgaaagcttggagagggtcccactggcggctctcaagatgaccttggtgggtatgtagataaagatgatctagctcaatagtcctgtaattacttttatactaaccttgtatttatgatgaaagacactgttatctgtgtatgatcatgatataaggtattattttaaaatacatttattatttgagtcaaacacaaaagtctatttgggaaaatgctaaacaaataatacagatgggatatgaacttgccagaaactatataaaagaaacctgcagaaattgcaaatgagctggagtctctgaaacacactgggtgagaagggcagggtttcaggaaacctaccctctaagcccagatctggccccagtgcacgggaggacctcaagccagtcacttccctctctggcctcaatctccccacctgtaacatgaaagagcagggctagaatattcataaggtctctcccagctctgacatgccatgaccaacttaacaacaaattagttgctgaaaaaccttgcaggattcccttgtggtgattttccactgtagaatctttctccctggggaaaggatggtcatgatcccaggcagggcaggagcagagagactggaaggcctctccctaccctcacaggagccctcatgcccaggcctgtgcttactgctgctggctgatgcttctctacttccctgttttacgtccctccttttgtgcaggacccctcagcagagagcaacaggagcagaaacagcaacaccctctcctgccccaagaataatgatagaggaataagttcctctttgtctccacttaacatttaaaaggcttcctagactggctcacagacaacccttgccatctcacctagggatcttattaaaatgcagcctgtcaggcccagcaaccaagactctgactctaagtgaaaaggcccaggaatctgcattctaacaagctctcccaaatgattctgatgttggtggcccaaggaagtggtccttagaggaagctgagactcaataaggtgaagtggtttcttccaagctacagagccagtacatgcaagagatggggccaggctagttatctgggctccaaggctagtgtagtgctctactgtcctcatttctcatggtagggaccaaggtcccccctgacatcttcccattcctgcagggaccttcatgatctataggttggaccctcccaggtcttaaaagtcaatgggaaaatccaagaggacttctttatctgaaaagattctacacccagcctcctgctctctcctccaaggagagggaagccctccaaaactcaggaccctccaaagttaagggagacccagtcaggaggaagcctctttatactgaaagctcagatcctgggaagagagagagggagaccatctttgcatctctaccactgataatcctttgtggggaaatcataggccccaggcgaaaggtgatagaaaattgacaaggaagacagaccaccccagtgggtaaaccagtatggactgcctggcctgtggggaacccaggtatcttcccttgcctgctcaccatctattcattcagtcagtgactaatcactgagtgcttactctgggccaggctgggggctggggaggtgaaggtgaataaaacaagatgcagtgactactcacctggagggggatggaagtccctggcagtgccaccttggggcagtgctgccttctgcccatcttgtctgatggagctggccaggggcatggtagaattcttggcatttgagaagcatcctgtagcaagggacagcaatgtttttctgcaaaggaacagatggtaattttaagctttgatggtcagatggtctctgtcacaattacgcaactcttctatcacagctgaaactcatctgtagacaatgtgtaaataaatgggtaggcttatgttccaataaaactttatatacaaaaacaggggtcaggccagatttggccctcatgctgcagttcatcaaggacatgaccctgacacattagtgtggcactcaaagtccttcccagactggccctgttcatcccaggctcacctcccatcacaccctccccggccctgtctaccttcgaggtgcaggcagctcctctccaaattccaaacctttcttgccctttaaatgctttggtgtctttgccatttagaaaccactgctcctcctgccacctcttcctcttctttcccctcttcctccctgtattaattttctatggctgttgtaacaaattaccacaacctgagtggcttaaaacacagaaatgtattctcctaccattcagaaagccagaagtctgaaatccaggtattggcagagatagctccttctggaggctccaagggaaaatctgatccatgcctctctcgtagtttctggtggttccagcaacccttattcttctttgacttgtagacgcatcactccactttgcctccatcttctcacagccttgccgtgtgtgtttgtgtgtaatgtccctttctcttataaggacacctgtcattggatttagggcccaccctaaatcagcaatgatcttatgcccagagccttaattatatctacaaagactatttggagcaaaattcctggcaaagacagatcaacaactgtcagctcccagtcggagagaaagggcctcttcagtgctatctcaggagactgggagaagcagcagaaaggaccccacaagaaagggagaggtaccctgggtcaggcgcctctggagagagggtccttttccttccctgttcctcacttctttctcctctcctcctccctcacttctccctcctttccgtagccctcctcctcccctgaactacctgaaatcaaagacagctgctctgctatgggaactgggagaggcagccctggtttgaggctgtgactaaggcctgtgtgtatctcatcacctggtgattaacagctctggctcttacccaggtagacccaggagctcccatcagagcagacgagaacagggcaaaaggatgtggagttaaaaacaggcacttcctcaagagaagtgtgctttggtcttcctccaatggactccatctcttagttcctggcaccagagctatggggaccttcctacagggatacctggagactggttctagaattgagaacctggctcagtctcaggccctgtgggagcacaagaaagtacaaggcatggcccctacctgcaaaaaagagcacggtattagtgtggggtcccccaaaaaagcagaccctaaagaaaggatctgagcacaagtagttgatatgggacatgcaaggaagtagtggaataatacaaggaaggggaggcaatgaataaagcatgtgttattaaaccagtggcccctatgagtaactgaagctcaaatcctttgggaaatggagcaaacatactccctagaattatccaaagatttgatccctaaagacaaaccctggcagtaagaagtagatatggagcatggaaaggtctgggtgatacaagccagccactgacaacatcaactacaatcatagggcccagaatgtcagagctaggagaaatccaaatgggcagaggaggaggcttaaaacattggctataatttaagtttgatttatccactgtattatttatccagacaggcaacaaatagccactgaatatctactgcgtgccaggcatacctattgcacaacaaatcatcccaaaacttagtggcttaaaataataaatatttattatctcactcagttttgtggatcaggaatttgggagtaacttaactgggtggttctggctcagggtccctcataagattgcagtaatgatgttatttggggttgcagtcgtctggaggctggactggaataaaagatttatgtccacggtggttcacttgcatggctagtgagctggtaacagccactggtgggaggacccagttcttccctatatagggccctccacatgctgcttgagtgtcctcacaaaatgacagatagcctttctcaaagtaaacagtcctcgagggacagccaagtggaagcagcttccttttaggacttagcctgagaaattacatcacatcactttcactgcatttcattcattagaaatgagtcaccaagctgggcccacttaaggagaatttgagaggaggagtgtccatgaagttgcaaacccatctgacagccactacggtactgagttgggtgctggagatggtgtagagcagtggtccccaaacctttttggccggttttatggaagatgatttttccatggacggtgggtggggaaatggtttcaggatgattccagcacataacatttattgtgtactttattcctattattattcatactcaccataatgtagaatcaatgggatccctgagttggtttttcctaggagaatctaatgctgccactgatctgacagcaggtgagacaaataaccatcacataatcacaaatgaaagtacaattacaattgtggcaagtgctggggagatggtgacttggtactccaagggactattccatgggagtttggtctgccacggaggtcagaaaatgcttcccagagaagctgtggtcggtctgtaatctgaagactgagtagggtcgaagggagggcattccacatggagggagccccatggacaagggcctgttaataggtgatgtccaaggatacaacttgaggtctaggagccagaaaggagccagcccacgctggccttgtaggctatggtagagatttttatttttgctttgtattcctaggggaatgaagaaccattttcaaattttcgacaggaaagtgtacagtgatcagtattaatgagagctatttggttccaattgacaaaaattatcttaggccagctaaaatggagagggacatgtattgccttggagaaaattaagaaatcacttcccagactaagccaggtgaagggcagaatgataagcaaccttcagccgtgatgggatccagaaccaataatgtcatcaagtctctgcagctgtttctctctgcatgtgagctcacctcttccttgctgctaattggcattctcctaatagtttccaatagctccaagagttacatcagcctccagtgacatcctcaagctctctaaaatcccatgttcaaaagccccagaggagggacacccattggccgagcttgagtgagatgtccacctccaaaccagtcaactgagaccagcgggtgtggctggagcagctgtgtgtgcttgggccttgtctggagtcttcatcttgctgttccccttctacttcactgttccatgctgggatgatggttccttatttcaggacccttagaactctttgtacatcattttagtctccatatatggaaacctcaagtttctttatcagtagtgtgttgctaaagaggtttcctccccactccttgtaaggaggcagttgttaataatttgttggccagaaatgtctattcctcctgtttgcaaagccctgtggctttgtagatctctaatctgggcattctgcacttttgccaccttggtcggccttctgtaggtatttaagtaaagagaacaattaaattcctccttagttcttggcaagaaggataactaaacatggatttccccattgaacaggaacaagttctaggacacttcctgtgtcacatcttgaaacatcccctgactgcacagcttgtgttgtctgattattcccctgcatcaacacagtatagattggagaggaagtggagagggtctgaagcataaacacacacgtgcacacacacatgcatgcacgcaacacacgcacacatgcacacaacttcccagcaaggaagggagttagaaatgttgaaatattatagcacatgaaatcaacccactgctaccctgtcccaataatctgtgcccatgcttcatgtttaatctcaccagacctaaacgcattgtcattagtcacattgtcataatacaaatacgatatacaaacctaacaaagtgctttagaacacagaagaggcaataatgaactctgcataacaccatcagagacagcccttcagagaagtagtggcttttgagatggagtcaggcagagaaggggacaggacatgccaggaaaaggaaagcctgtgaagcacccaagaggtataaaaaggaataatcctttgagaaacaacaaaattgagtggctggagtctaaaattcatggagcatagtcacaagagatgaaagaggtaaggtagacggaaggtcaggtgtgtcaagccaagaactttggcctttatatatgcacatcagcattttttaagccttagattttaaaatgttttgggaacttcaggctttcattgagatgcatgaccagagctgccttggatgaagggaagatggagtgggccccacacacacttcaataaaggagctctactgctgtttgttttgtagggtttccttatgatttcctttaaacaaagggtacagttgctttaaaataaaaaaaggaagaaacaaaaatttttttaaatacgtaagtaaaaagtatgggtgagtgtgggtatgtgtgggtgtgtggtggggggagtacacatgctaaaattcatacatacaaaatattatgaaagtgagaccacaggtatggaagatgcaagcttcacactgcctagagagtgctaagccagtcaccccggggagtggcactcactttctggtgagtttctcaagggtctcctcctaattgttccagtgatttctttattctcatctctttccactttgctgttttatttcattatttatttacacaagaagttcctgtgtattacagaaaaatagaaaatacagataaaaaggtaaaagaaatgtgactataattctaccatctcaccatccagtaataatcactacagatattttgattgattgactcatagagactcatagaaaatttttttttacaaatatggaagccagtttgttgtaagctgaaatttcgcactcttaaattaaaaaaaaaaaaatacctattgtgtttcaaccaggagattcacaacagacctcataaagaaatatttgattgatttgagctttgacggatgagtaggagttcaccaggcaaaggaggaggacaaggaattccagactcaggaagcgcagaacaaggacctggaaaataaaagtgcatagccgatttggggaatctggaaatggtcaggtgggactaaaattatggaaatgacaactgagggaaagcagatgatgctagaaagatggaatgggaaaggccttgaacgccatgctaaggagcttgccttgttccctgtgggcacagggagccaaagaaagtctgtggcctgactagcgaaatgaggccagcgcaggtgggccatggggagactcctgccccgcaccccaccttcgtgtgtcaggaggtgtccccagcctacaggagggctgcaaagggggccctgggtgtcctccatggtgaacccactgttttcagaagacgaggatgaggcccatttccagagactgcccagcggcaaagtcccccgggcctttagctgctcaaccaggaccaattagcagaccccagagaagaagcaatcaggggagggtgctgagcgaggagaaacatcagtttataattaggtggcctaatcacctgtgtaaattgtgtatttcttatgatcgatgtgctaaatggctcaggtttaattaagttctgctgattcattctctttgaagacctattaaagtgtgagtcacagcttgcaccattaacaacggggagaggagcaacttgaaaagggtggcagttccctgctgcctccatccccctccactgttgtccccacatgcccactccctaggtaggctgggctttgaccacctgcttctcggcttctctgcccagaacctggtagggagatgctgggctggatgggaacccaagggttttctcactcctgatccagttctccttccaggatgatccatgctgcctcagaagtgtcccctcttagcagggacccagaacaccctggtttctcctggtgattgagaatcctatcctatgcatgggccagggccatcaatgagcttgtattttccagcctcttgtctaataacgagtttccaaaattctacatgctgaactgcattctaccttcttctctgttccatattatgcttttctgccttctcccaccttgttcccttatttgtaactctctgtggtctgtaacccaagcatcagctttcctggcaacccctcacagcctcctcttttcctgtaggaaagttgaagtgctgaccttcatcattcctgagctgcccccttggacactgctctaacctcatttccatgactccaggctgaattctatctgtctctcccaacactgctcttggccttctgattgggtctttccagtcataattcctcaccagtatgaattttaggcacccctccttattccaagagaggccactaaaactgtgagacacaagcacaacatcatcatcatcatcatcatcatcatcatcacctctcaaggacaaacatttatcctgagaatgtgtagttcaaagctaatgagaaaacatatttttctcaccaggctatgacttggcaggcagcccctcccccatgaagtcagcagtcaggttgttttgcagagcagagtttagatcctttccttcttcaccccacctctaaattaccttcttccagtactcttgggaacaggaaaaagccatcatgtcttaaaagctgctcctttggttacacaagtggaagctttgaaatatttattttattatagattctattcttagtcataaatccttgttcacctgagtttccttctggggtaaatggaggagacggcttattttcgttatgacccgtcttctgtttctactcctctgttctccatattatttcatttcctgtattctggttccacaccccacattctctcccacagttctatagtcccatgaagacctcaactccctgctgtccttgacacctcagttttccaggtcaacctggaatcttcccttttgtaattttttttttttttgcagcttcctacagaactgcactatatcatttactatcatctaatatgctgactgactgaatgaatgaaggagtaaatccaatactatcaagcatggcttgttcattttgtactcctgcagactggccctcagtgcctattaggtgctggttacagagatgacattcactgagctcttggaatgaattaacacctgccatttctctctacatcaattctgactgacttcagctatatcccttaaacacaacaccagctctaaacatagaataaatatctttttttaaaaacccatgaagttaaaaaggcagtgtggacttagggagggaagggggtagagaaggagaggcagagatgaggctctcctacagaggtgggtcacaggccaataactcactctagtggggagtaatgttcaaagcctcactgcctgcgactcccaagaagcttccaaaaatccacaatagtgagcgaaagtactttgaaaggataaaaatggattaacaacaaaaatgagggctagtagaagggagtgaaagcaaaagcaaacttgaaatcccatttctacaactgaggcaaccgggcctggtggcttcccagagagaaatctcactagccctgtccctttcaccaagtaaacgcgttctgcaggcaagcctgcggtgagtgcttttgagccattcatcctccatcccagagacggaggattacaaatgtcagggtggattttgccttagtgacctgatcattcaatgcctctctctccctccattctactgatggggagactgaggcccagataatgaatccagaatgtggcacaagttgcatagtggaaccaggaacacagcttggattttctgatgtccagctcactggattttctactatccaatgacagcaggatcgatcataagcaccaagaaagaaaacaagttagttgatttcttcaagtgttaaaccctcagaagtgaaatctatttttcactgagtgtctactccaattcttagtatgtgatggctttacctctcttatttggggtaaaaagaaagtgggctgagtgggagtcagaagacctcagctggagctcagactcccacccctcctttgtagcagcttcagctcacgtcagtcatcctttctgatgtgtgacatctgacattgtacaaagttttagacgaatcctgtggaagtcttttctgtccaacaggattgagagcagagcctgaattctacttttatccatttaagacatatatttgttaagctctctcggggagccagttcctcagctggtctcagatacagtcagttacagtccctactcagatacagtccccaccctccaggggctcacagcctagagatggatgacagcagacatacgaggctcccttccctgggaggcttagagttctctgagcatgagtgtaagtgaccctgggacaagaagtacctcggttcttaattatttcccaagagcggtttttcttacaaggaatgtggaaaaaatcaggagaggcaaggtgttagctagaatggtaggaattccactgggccccaaaagtgaaggtgatctggggagagggtttgtgccttttctacaatccctaaaatcacaacacagggacaatctgcagtccaattaagacaaggattttaattctgtcctcagaagtccatggtcaggtaaacaaacccactgccaccgggtttggtccttcctccaatgtcctctgttacctggctccaaccaggagctacaggcaatgctggttgagtctcccattctgccaatggggcaatcttccttactctccattgtgtggccaggttcaaggaccacttttctgtccttatcataattggtctctctgcagcatggacccagctgactgtgccttctttcagtcctcactttcctcctccttcagaggcctccccttctcggtctctttgttgccttccctactgctgaacctctacatggtgaaggcaccgcaaacttgctcctgggtcctgtcctcttccccacctacactttctgcctatgtgatacccattcccatgactacaaaggctaaatagatgctgataggtccttaatttgaacctcagtcctcagttcccctttgagctccaaacttatcaatgcatcttcctattccatagcttcctttagctagccaataggcatcacacatttaacatgtccaagatgaacacctgatttccccataatacaaacacatgaacacacacacacacacacatcttttgctcaagccaaaaccaaattgttgtccctggtttatctcagccaaaagataatccatcaatctcacctgacagcctctctccaaaatatatcccataattagctctacacctccctgcaaacaacttcagcagcatgacaagagagatggtagttgatggagctcatcctactaatcacatccaccaccactgtaccactagaggggtttgattctctttcctagttgtataaagaaaaatgtccaggatgaattccaatagttccagttcagtttccccacacttgaaccagttcccactacaactacctggttggtgtatgtgaagaacagttttcaaaaggagggcagggcagttcccaggaaagaggcacttctggacagataaatcccagcaggtgtccacctccctctgttagcacagtgaccaccatgtattctaggtcatgtgcaagcctatctgtaccccttatctcaccatatgatgagtgcttccaatcaaggaccgagccttcagcttttctgcaacgcactgcctagtgttgtgcctggcagaaaggggtttgtgcttaacaaaaaggtagatgaatgaatgataaagctagcaagtggaatgaagatattgccagtaagaaagattacccagggctagaaagattaggaaataatttttggagattataagaatgaatgcagatgctgaagaatcagcagatgttagaattgcagacaagagagaagaggtgatcccagaccgaggtgattgtcttagaaaaaacaaagtgataagcacacacgtgatgtgttatggatatggtaagcagcccaacttgaatgagcaaggtgtgtgggtcaacaaagtattggaggcagggctggcttcatgggtgtgtgtatggccaatgcagatgctcaggaccctgtgcttagaaggaggccctgagagtgggattgaatgcatattgtcaccatcttgaaatcttagtaattgcatgtttgaatctctgattagtggaatccagtggaacagtgatgcatgcaccagaggctatcaatgccttctcataacctcccagcttctctaggatggtcttggtcaactgtttccctgctgctacccagcaactactgctccctccatcttggtggggaagggaactgggcaggggttcatggagggttgaggtcaagcactgagttgcagagtggaaccaagtttcttcatggggtatccatgactctaagtctcagggtgggtccccaggtccctgcgagacctaatctcaccctgtgagtatgcttatgctctttgagggatgcatgacatgaaatagcaaataaaaacccactatgacaatttaagagactatggaaaaaataaaaagctatctttctgctttttgagcaataggccccacattttcatcttgcactgggccccacaaatgatgtagccagccctgggtagaatggaggctggacaggtgagttggagacaggctgtcaacagctttgactgctatcgagctcagcctttactttgcagaccaagactgacacactttttctatgaagaaccagctggtaattactttagtctttgcaggccacacagtctctgttgcaatgattcaactctgctgttaaagtgcaaaaactgtcagagacaatacgtaaaccaaagggagaagctgtgttctaataaaactttatttaaagacagacagtgggccagatttggcctggtagccatagtttgccatctcctgctgtagacaaaaggaagtcattgaaggcaatgtagcagcagaaaggcacaatcagagaagattttctagatggttaacttggcctcaatgtccatggtgggtgagggtcggtctagaggcagaggattttaggaaagagaatactgtgaagctccaagctcaagaagccaggggccaaggctcgggagcagcagtggggtggaagggtaggacaaggcaacacaaaaaccccacctaggtgctgacaccaaggccactgacacaacttggaccctctcccatgcagaaggaaggaagagcaagcggagggttcgtaccaccttcaccactgagcagctgcatgagctggagaagatcttccactttacccactacccagacgttcacatccgcagccagctggcagccaggatcaacctcccagaagctcgggtgcaggtacagccatccctacctcagcccccagcctccatgcccttgggaccatgtgtgagacacaatatatccagggacttttcgggttgccccatctaaaagtttctgttggctttatcctgtgagtacagtcattttggccaaatattattttccatgaaatgaggtcactatagctccaaaatggtttctctcctccgggaatggaaagggagtaaagtggcatcagtgatcaccatggatctgctccatacccttcctccccgcttggcgacagttcccaaacgtcgttcacaatgcagcctcattcacaaagtattggccatctagatcaggggtcaacaacctttctgcaaagagccagatggtaatgatattaggctttgcagggtatatcgtcagtgtcagagcaactgttcaaccaggccaaggtagcacaaaagcagcctcagaaaatatgtaaacacactttatttatgaacatgaaatttgaatgttgtgtaatttgcctgtgtcataaaatactacccttctttttttttctagccatttaaaaatgtgaaaacgattcttagttcatgaaccattcaaaaacaggtgaaaggccagatttagcctgtaggccgcagtttgtcaacccctgatctacaacacatgggtatccctttggaggcagtgtagagaagtggaaaaggtcttgaattcgtggtcttggtcggagacctggtttaagcaccaacaggctaatctctcatctgtgatctcttcaccgcagtttattgcttcatgcaggattagaaatacagtagcccattgtcactcactagaggtatttcctgccctcttcacatgcacccagctttgcaagtgccaccctagcacacgacgttccaccagatctcactgtggcaccgttagcattctctctaaaatagttctctaagttgctctcctttttttctttccacaaatgtgatggactcattctaattcaaaatcaggccaacattctgttctttattctatcctttccttctggctggggaccactcatgtctaagacttctctcctttttcttcccatctagaatcaggcactagctaaatgggaagcccctgtatcagccacaaagcccagaattcaacacctgcctatgcagaattaccaaggataaatggccacaagtcagggaccatcagcacctgctcaggaatgcagggagctgccaatattcagccggccaagaggccccaggggttgaaaaggggtggcccactgatgacccacacatgacttccatttggtctgcacagtagtttaaaactcagaagctttcacatataaatcaatattccactttggagattgcatgaacctgcaacaccggactcacatttccacgtggtgactgttgacgggagctgagaagctgccccattttggctctattcaccacagaccccgccaatcccaattgggcagcaccagctgcttcactcatgcatggccccctggccctgtaggcattgaaggtggaaaccccggttccctctcagaaagctgacctccagatccaaagacatcctggatgccacagagctttacaaactataaagtacagtcccttggaaggtgtagttattatgaatttgggggaagtggtattagatggaggaaaactcttgcttatccccgtcctttctccctgattacagatctggttccagaatcagcgagccaagtggcggaagcaggagaagattggcaacctgggggctccacagcagctgagtgaagccagtgtggccctgcccacaaatctggatgtggctgtaagtggctgaggcctcaaggtagggtggagggagccattgtctggaaatatcccagtcagacccagatgtgaagaagcacctcgggggctctgtctacaggaaaaagtgcaaggaaaattatattagaaacagcatggggcaaggagaaatctggaagactgtggggcctgggacaagtggctgcctgtctgtcctcatgtctcctcccttagtgaacatcatggtgcctgtccttcctgtgcaaaacttctcagtttacaaaacaggatcacagagggaagtgcagtacacagatgttggacacacgggctctggagtcagactgcctgagttcgaatcccagctctgaattgcctgaggagtggcttggaagagtcaccttatccctcagagaatgtaataaagttttttgatgaggatgaaataactgagatgtagaggatgcttagcacctaggaagtgctccctaagtatttagggagccattcatggagacagcacgtatttttgagtgggcaccaggtgctaaacacgggatagagcagtaaacaaaatagacaatacttccctgccctagagttaaaggtttttacatacccacagtgatgccatgagatgagatttctcatttattcattcttggcaaatgtagaagctgggctctgagaggcaaagtgacttttccatgtcaaaacaattgtaagtaccaggactcaagccaggttttaaatccccagaccatgcacttctccccacctacagtaaccaaccatccaggtttgcatgggtccacacaggactttcagagctaaacccagaaggtcctgagcaaaccagaacaagtggatcacactacccactcttagctgcccaagccatggagggaaacgctgagaagctgcagagacagcttaggactcacttctctctcctgacctctccttgtgacaggggcccacgtggacatccactgctctgcgcaggctggctcctcccacgagctgttgtccatcggctcaagatcagctggcctctgcctggttccctgcctggatcaccctcctcccagcgcacccatgggaaacacagcctgtcccaggtcttcccatccatcaaacttgcatccctgtgctatgcatccttccacctccacaccccaaatggggcagcatctgtgctacttcaacatagagattggacatgctctccccaaatgagccactttcctctccaggtgaaggcaggtagcagatgtgccctgggcctctggggaaatcgatttcacaatccaaaaatggcccacagcccaggaagctaccctgaacatgccagttggaaggctgcaccagactcaaaagcaaactaaacaataaaggacagctctcttctctcctggctaaagctgctctcctggttcagaagacaggctggatgagatctcaggccgagctctgaaatagggaggtaatcctccagcacctgtgtttcctctaacttgctgtgtgacctccagccggtcactcaccctctctggacctcatctgtaagaggagccagctggataagatgatttctgaagacgcttccatggtgggcactgaggcacagaggaggccaaggagaggttgtttgttcatgcatgcattcatccgtgacacatgagtacctactgaggactccataaacagaacgggatacagagataaacaatttgggttctgtccacgtttgtcaaaaggtggtgctggcccacctctgaaagcagaacacttgctcaacaaccttgctgttggcccaagtctaacacattctttatgactgtgagcatctcagagtgagagaaaaatgtagaaagttttttaaattctaaacaggatttagtgtctttagttatcttgctggatgggaaagggatgttgtcatttctggcacaaatgaaaagtaggacggaaagctcctttcattcagtttatctttccaggatatatgaaaagggaccagctggaagactagcctcactctgtcctcgaaagcctgagctttcattcaactccctatttccatgcaaagacgctgggcaaaccacatgttctgtctgagcctcagttttcctatccataaaatgaaggtagccaggcctgcctcaaagagcattcaggaggctctgagaggacatgagagtattttgcaaagtgagggcaaggcccagtgtggagtgatattgttattccaagattccactgcaaaagtggctgctttggatgccagcccaggatgagtagttcctgttctcagggaggtcatccgctgagcatcccttctgcacagatgtctctgattcttgtccttgcaggtggaggacagggcctgctcccctaagctgggaagcctggaatgacctcttgcacaagcctaaattccaggaatcttccccaaatcccagatcctctgcaatctacctgcacccctgacccacccaggagttggaccgggagttgggaagcctaggtcttagtcctacactccttctaatttgctgtgtaaccttaccattaatctctctgggtctcagttttctcatctgtattggaggtagcagtgctagctctgccttcaggcatgcaatatgccagaactacagacaacagcccacaggatgcaaaagtgctttgccatcttaaaaatgccagatcactcagagcctatgaatgtggatatcaacaccaggtctctagcaccgctggatgaaaggagaaggctagaggctgagggaggaaagagcagttaacaaacaaaggcagtagctcatcacttgggtagcaggtacccattttaggaccctacactcaaatgtgcaaaataaaatttctatcattttgctataactggatttactttctatgttgtttgcaggaaatgtattctggtaacttctaggttactgatgcctcaggcacttcaggtttaaaggcagtcacttgagatcgttgccctctgttccccttcttcccacaggggtctttgctaggctgaggggcagggttggagaagtgtttatgcaaatgccacctccagcctcccagaggggatgtttgcttcccagctttctcagtctcctactagtgtcttatctagcctggccttgggcatgacccctctgccctagagatgtatcaccccattcaactccctattgggggttcactccacatcctccgctgtagcctctcaccacagttgtgaatcctcgctggcttcctctctttctcatgagcaagaggaaaagctgacaactatcccacacacttctagggccatgggagccctgggccaggcagcaggtctcattcattctagacctcctacagccatttctcatgccctggtgataggaaggtcatggatgagacttgcagatctccaaacttgtaagaggaatggaaaagatgcaggtcccctctgctctggggtcccactcccctttctcagcaacatactccttccccaggctcctcttgaaacaggattttctcaaccatagagattcagatgatcagatgtctcagcttcactactgaggtaaacattgattttgtgaggccacttctttccccccaggaattttctccccaataactatttttattccctttaccttatgtgtgtgggataaaggaatcactttagaactcttgccaggtgtgtgaccttgggcaagtggcatgtcccctctctgtacctgttccctggataacaacaatttcttgcctcttagagtttctgtgacaattaaatgagttaatacattttggcacatggtggacactcaagccatattaagaaaaactcattttcccaaatacaccttctacctctttctacttctgagcttgagcatccattctgatctcaagctctattccaggagttcttaaaccagtctccaggaagtcaaggagctcccaagagactatgcaaaattgtgtgtatctgtgtgtttattttttctagggaaagggttcattgctttcatcagcttttcaaagagctctggggcataaaaaataataataataaagaatctctgtcagacatatctgagtcagatcttgacagcttcatattctagctgtgaggactacagacttgagagaagatgaaggataactattttagaaaggtaaaataaaaaaatattgctatggtttgaatgtgtcccccaaaaaatgtgtgtcagaaacctaatcaccgttgtaacagtgttaagaggtagaacttttaagaggtgattaggccatgagtctctgtccttatgaatggattaatgttgttattaccagaatgtgttccttataaaaggataagttcagaatctctctctctccaccccccaacccccggcaccttctctccccttctctcctccactcctccaccattttccttccaccatggtatgacacaccttgacagcaagaaggccctcaccagatgccagtcccttgttcttggacttcccagcctccagaaccatgagccaataaatttcttttcatatattaattacccaagctgtggtatgctgtaatagcagcacaaaatgaactaaggaaaatagaaaatgaacaaatgcccaagttttatttagctcattaattaatgagagaactgctaagatgtcataaccagctcaaaggtgaacatgcacacatattaaaggaacagacaagcatacaggcaatcaggaatgctgaaatgaattacaaataaagaaaaacaagagtcaatagccatagggaaacaatcaatttcatctccaccaagcatgacttatttgcatttctagtgacaagaatcactttcatttctaaccattctctactcattgaagttgaaaaatagctcaaagataataaagatgcagatattctgaaagaatgtgctagacaaaataccctgtaatctttatgggcccttttcaaaatctttcaaaaatttgtacccgcataaagttactttgtctatctgaatctcactttcctcatccattaaatggggatgaccacctgcctcagaagattgccatgaagattatattagatgatgtgcgtatagtttgtgcgaataaaacactttgagtgtaggaaatctttattgcttttcaagctcctctagaactcaagtttaaaagcccatatctgtaaagtgttttgaactacagtaatatttctttaatatccatccaccttttatagttcaatttcttaaaaggctaacccagaggccaagttgggtggatcacgaggtcaggagatcgagaccatcctggctaacatggtgaaaccccgtctctactaaaaatacaaaaaattagccgggcgtggtggtgggtgcctgtagtctcagctactagggaggctgaggcaggagaatggcataaacccagaaggcggagcttgcagtgagccaagatcatgccactgcactccagcctgcgcgacagagcaagactccatctgaaaaaaaaaaaaaaaa

SEQ ID NO: 550 - DNA, 15287 bp, Homo sapiens
gctttacccagagtcgccctgccgcaatcgcgcgtctttccaccgaggccccggatgtagattccctcccccgttcagtggtcgtggcctcacagcgactctaagacttggggctctctcattggctgtaactcttccactggattggtagcaaaaaaagaggcggtgcccaaggcgaaaggctctgtgactacagccaatcagaatcgaggccgggctttggcgggaggtgggaacgctgtggccattcggatttggcgcgagcgcggctggagtttgctgctgccgctgtgcagtttgttcaggggcttgtggtggtgagtccgagaggctgcgtgtgagagacgtgagaaggatcctgcactgaggaggtggaaagaagaggattgctcgaggaggcctggggtctgtgaggcagcggagctgggtgaaggctgcgggttccggcgaggcctgaggtgaagtgaagggaaaagagctgagctcgctggaggtctgaggtcgggatcagggaaagggcaggtgccctcggggtagttctagcagttatgcgtggtgtgaaggaggtgaaagttgtaggaaggaaatattctggggtgcgttgagagctgcctagaatgaggactgagtgcaggggcggaaagaactgagggaagactgagctgcagtgtgagggcttgggatagaagagactaaatgtggcgggtgctgggctgaactggtgataaagacaccccgcgtgcctggagggaggaaactagaagttctatataaatcaattcatgtaacttttttttttttttgagacggagtctcgctcttgtcgcccaggctgtagtgcagtggtgcgatctcggctcactgcaacctctgcctgccgggttcaagccattctcctgcctcagcctcttcatgtagctgggactacaggcgcccgccaccacgtccggctaattttttttttttttttgagacggagtctcgctcggtctcccaggctggagtgcagtggcgcgatctcggctcactgcaagctccgcctcccgggttcatgccattctcctgcctcagcctcccgagtagctgggactacaggcgcccaccaccacgcccggctaattttttgcatttttagtagagacggggtttcaccgtgttagccaggatggtctcggcccgtctcggcctcccaaagtgttgggattacaggcgtgagccaccgcgtttggccgtaatttttgtatttttagtagagacggggtttctccatgttggtcaggctggtctcgaactcctgacctcaggtgatccgcccgcctcagcctcccaaagtgctgggattacaggcgtgggccaccgcgcccggcccatttcaggtaacttgttattgcatcgctcaattggttaagaacttgggctctggcaccagatgcccggggttacattcctgtttttctgtgactttgggccactgtttatctcagttttctcatgtgtaaaataaaggctaataatagtacctactcctaagatcgttgttaaacgagttggtacctaaagtgtttataacagcgcccttccacgtagtaggtagacaacaaatgtcagctgttcttgcatagatttggatgtgaagcaaaagtgaatgctaaaataagtgtgataacataattaggaaataagtgttaatcatcagtataaataaattccatgttagttattttctcttcactttcacatattgactagttgtcctcttattttttttaatctagctgtgctgtcgtcatgcctcaaacccgatcccaggcacaggctacaatcagttttccaaaaaggaagctgtctcgggcattgaacaaagctaaaaactccagtgatgccaaactagaaccaacaaatgtccaaaccgtaacctgttctcctcgtgtaaaagccctgcctctcagccccaggaaacgtctgggtaaaccatccattatatcactttttcactagcagctcgtgacctttcttttcttggtaagatgtgtgtcctttgaaggagctttctaagttcagttaagacttctttttttttttttttttttttttgagacagagtctcgctccatctcccaggctggagtgcaatagtgcgatcttggctcactgcaacctccgcctcctgggttcaagcgattctcctgcctcagcctcccaagtagctgggattacaggcgcccaccaccaagcctggctaattttttttttttttttttttggatttttagttgagacagggttttgccatattggccaatctggtctctgaactcctgacctcaggtgatccaactgcctcggcctcccaaagtgctgggattataggcatgagctaccgctcctggcctaagactactcttcattttagttattttcagaatggttgctaagtgcttaccgaactccagagttagacacttactgaggtcactctgaactacttaataagtctgatcttcaattccttaatactgaacttagttctgtcaatgttttaagttaccttgtagttacatggtattatgaaacttacctcaatatttgtgaaattaaaagaaacaaaaacgtgacatgatgaatattttccatcctttaggacagtgattggtaattctttcttgttttggaacatttatttttaaatggggggtaatttggttgtttctggagacatttttggttgttacagctgggggttgctactggcatagtgggtagaggccagggatgctgctagacattacaatgcacaggacagctccttgacaatgaagaattatttggtccaagatgtcagtggtgccaaggttgagaaaacctgtttcaaaatagccttacaatttcatcctactaaaacccatttggtttctactaaatgcagtagtccccacttatccatgggggatacattccaagacccccagtggacgcctgcaatcgaggacagtaccaaaccctacatatactgtgtttttgatttgataaccaagtcagctactaagtgactagtgggtggatagcatatacagtgtggatatgctggctgaagggatgattcatgtcttgggtaggatggtgcgggatttcatcatggcactccacagcatgcaatttaaaacttgtcaattgtttatttctggaattttccatttagtattttcagactgagggtaactagaacggtggatgaagggactactgtagtaagatcagtggtgccatctggtgaccaatatttgctgctaagtgagaaggcattttattttggtggttctgactaaggtagaaattcacctctttctggaagaggcagaggtcttgcacatccttttactatccaatgctatgagtgactacatttttattttattgtgtttcaggcgatgacaacctatgcaacactccccatttacctccttgttctccaccaaagcaaggcaagaaagagaatggtccccctcactcacatacacttaagggacgaagattggtatttgacaatcagctgacaattaagtctcctagcaaaagagaactagccaaagttcaccaaaacaaaatactttcttcagttagaaaaagtcaagagatcacaacaaattctgagcagagatgtccactgaagaaagaatctgcatgtgtgagactattcaagcaagaaggtttgttcttacatggcaactgttagtgcagccattgtaaccaaggctgatgactccaaatgaaaccacccactgggtcttctcattcaccttctgttgtgtctaattgaccttttatgtctggcacaggcacttgctaccagcaagcaaagctggtcctgaacacagctgtcccagatcggctgcctgccagggaaagggagatggatgtcatcaggaatttcttgagggaacacatctgtgggaaaaaagctggaagcctttacctttctggtgctcctggaactggaaaaactgcctgcttaagccggattctgcaagacctcaaggtacattgagagtctgaattatgatactcttggtaaaatgatacttgggtgtttttgtttgtttgtttgttttgttttgttttgttttgttttttgagacggagtctcgctctgtcgcctaggctgtagtgcagtggcgcgatctcggctcactgcaagctctgcctcccaggttcacgccattctcctgcctcagcctcccgagtagctgggactacaggcgcccgccaccatgcccagctaatgttttttgtatttttagtagagacggggtgtcactgtgttagccaggatggtctcgatctcctcacctcatggtccgcccttgttggcctcccaaagtgttgggattacaggtgtgagccaccgcacctggcctgttttgtttttgaaacagggtctctgttgtccaggctggagtgcagtgttgtgatctcagctcactgcagccttgacctcttgggctcaggtgatcctcccacctcggcctcctggatagctgggaatactggcactcaccactacacccagctaattttttgtagagacagggtttcaccatgttgcccagacttgtcctgaactcctgagctcaagtaatctgcctgcttcagcctcccaaagtgctgggattacaggtgtaagccactgtgcctggctggcacttagttaagaaagagggctaggcacggtggctcacacctgtaatcccagcactttgggaggctgaggtgggtggatcacctaaggtcaggagtttgagaccaccctggtcaacatggtgaaaccctgtctctactaataatacaaaaaaaaattagccgggcatggtggcaggtgcctataatcccagctactcgggaggctgaggcaggaggatcacttgaactcgggaagcagaggttgcagtgagctgagatcgcgctactgtactccagcctgggtgacagagtgagactctgtctcaaaagaaaaagaaggctgggcatggtggctcacgcctataatcccagcactttgggaggccgaggcgggcggatcatgaggttaggagattgagaccatcctgactaacacagtgaaaccccgtctctactaaaaatacaaaaaaaattagccaggcgtggtggcgagtgcctgtagttccagctactcgggaggctgaggcaggagaatggcgtgaacccacaggtggagcttgcagtgagccgagatcgcgccactgcactccagcatgggcgacagagcaagactccgtctcaaaaaaaaaaagagttaagaaagagtaggcctggtgcggtggctcacacctgtaattccaacactttgggaggctgaggcaggtggatcacctgaggtcaggagttcaagaccagcctggccaatgtggcgaaaccccatctctactaaaaatataaaaattagctgggtgtggtggtgcatccttgtaatcccagctacttgggaggctgaggcaggagaatcacttcaacccgggaggcagaggttgcaatgagttgagattgtggcattgcatttcagcctgggcaacagagtgagactccgtctcaaagaaaaaaaaaagaaagaaagaaaagaaagagtagaagtttagaagattgagggtttcttcaaaataaaacatttgtaatttcattgtttaaatctttccaaatgaaagtagagcttccttacgtgctgttagctcttcaaagacattttaggctctatcagatctttattttctgaggccaaaataactcccatatttgcatttttttttccagaaggaactgaaaggctttaaaactatcatgctgaattgcatgtccttgaggactgcccaggctgtattcccagctattgctcaggagatttgtcaggaagaggtatccaggccagctgggaaggacatgatgaggaaattggaaaaacatatgactgcagagaagggccccatgatgtaagtattgttctgcttcatgttgctctgtgaaaatctgcaaggtctgttgcccataaaaagtacattttgtatattttctctctgaaggatagttacataaacttaaagggaaagaagagaaggaagatacacctaattttaaattggattacttatagatgatgtggggtatccttgtagcagtaactagagataggttagattatgatctttaaactggtctcagctttaggaaagtgacctgaagtcagcctatatcaaacattagagggttaagaaggtgaatatggatactaactgtttctctttttatagtgtgttggtattggacgagatggatcaactggacagcaaaggccaggatgtattgtacacgctatttgaatggccatggctaagcaattctcacttggtgctgattggttagtgctcaattgttaatgttacatggtggttctaaagtattttttaagaatatatattcagcttatttatcagctattttatcttaaaccagctttctgccgtgtcaaaataagaaagttaaatgactatgtacatcttacctaatagatacatcttatctattgggatggggtaggagacaagtggcaagcaacaattagaatgctagattctataactggagatttatttagctttcagaagatttagttttccctttaggataatttgaccaatgatcaatgttgttgatctcctccttaggtattgctaataccctggatctcacagatagaattctacctaggcttcaagctagagaaaaatgtaagccacagctgttgaacttcccaccttataccagaaatcagatagtcactattttgcaagatcgacttaatcaggtcagtgccaactattttgccaaattatgtgttccttggatcacctgtgctaggaaaatttaacaatagttctaaaatatttttgccttgattgctttattaatggagcaaggagttcctatggaccatagtgagaacatttttatgtgaatttcagcttcattcatttactgggtgtctcagtgttgaaataaaagcaggagttagaggaatcacccaagcgcttttttttttttttttagatgagttttgctcttatcgcccaggctggagtgcaatggcgtgatctcggctctctacagcctctgcctcacgggttcaagcgattctcctgcctcagcctccccagtagctaggactacaggcacctgccaccacgcccagctaattgttgtatttttagtagagctggggtttcaccgtcttggccaggctggtctcgaactcctaacctcaggtgatatgcctgtctcggcctctcaaagtgctgggattacaggcatgagccatcgcacccagcctcaagtgctttctttaatgacctttaaaaaatagggcctatgaaaaaactttttctgttgaaaatgactaaatagattttttatttttgctaatttcagttctgattgcttttttccatttatgaacttctactgcatccgtacaaaaagcttaaatgtgtgaaaactctcaaacgtctccattatttatgagaagaaaaggcatctttttaaccctaaagagttgccaatcaagtttagggttaaatgtgaaaatatttatgcttgggacctaaattacagagggagaatcttatggttcaaactgtcatcttctatgtcttgtctgaaggtatctagagatcaggttctggacaatgctgcagttcaattctgtgcccgcaaagtctctgctgtttcaggagatgttcgcaaagcactggatgtttgcaggtgagttacggctctgttgcattcttttattaaaaaaaaaaaaaaagaaatgctgttaattgtctcatgtaactcaagtgaatgtggcttaagaggctctgttctgctacttttttacgctcagaaaggaggacttgtttctcagtggggagctctggatttccaccgtgttaatgtctgaaacattatcagtccattacctacagagggagaaacaaatgagatgttgctggcactccctgtggtgattatagattggttaattacatttgtattaaaaaagactccagtttacttttccattagctggtctcaagcaggtttatttatggacctgaaccgtctttgcctttagacttgttccccttcctttccttttgtgagcaccccttcttcccttcagttggtggtcccccacagttgtactccagacctctttctcccttcccatcctcctgcccctcctgctggggaaagcctctgtgccgactgatgaaatttcttccttcccagtagggacactgggtccattaaaatgatacttgctgtgctggcctgctggtccaacctccccctattgctatgcagaagacccaggtctggcttatggcttcctgtgggcaagtactttggagagagcagtgggagagtaagctcttcctattgctagattgcatgatcctgaatttgaaagtttcccctaatcagcaaactacttgggtaaagactgcaactatgagcaatagtcatgtaggctagcgtggtttagcctacacatatcctatgtatatataactgaagatatcccttttaggtttggtgtgtatgggtgatgctgactccctttagtcagtcacccacactacatatcctctctcctacccatgacattttctcctcatccaaaatgttatcattggcttaatgtatgatgacctacttggcatccattaggaggaaaccattgaagtttctcaaatctgatgtccatgaattatttcaaagcaattaagtccccttatctgagaaataacccagttttgtttgggggctttaaaattataaaacatcataattttaaagttacacgtaggatatgtgtaggctaaaccatgttagcctacatgaccattgttcatagttgcagtctttgagcaatggtcattaatgtgccgcttttgaggctggtggtttggtgtgtttggtttggctcagactaaattaattttagaaattttttttataggagagctattgaaattgtagagtcagatgtcaaaagccagactattctcaaaccactgtctgaatgtaagtagtttatctccttcctgtcttcctttgtaactagaagcttagcttttctgaggaaagaggtagaaagatgaaatgaacatagttaaatccaaactcacccatttttatgtgtgtctgtgtttttagtccgtttcgtctactttatttcaatcttgcctgccagtactatagttcgtgcattactggaaatgagttcccagggtattgattgcgtaaatggctgggacagagtaagttttttttccaagctctggaaatgaaacttgtagacaatgaggttggatcagctctctgggtgcttatgttgcgtgcactttaggtctcaatataggtgaaagcaaagcctgataaataagggagaattgggtaaaagaattgtgaagccaggtgcggtggttcacacctgtaatcccagcactttgggaggccaaggcgggaggatcgcttgagcccaggattgtgagaccagcctgggcaatatagtgagaccttgtttctacaaaaaattttaaaaattttgcagccattaaaaatatgagttcatatcctttttagggacatggattaagctggaaaccatcattctcagcaaagtaacacaggaacagaaaaccaaacaccacatgttctcactcataagtgggagttgaacaatgagaacacatggacacagggaggggaacatcacacaccggaggctgttgggggtggaggccaaagggagggagagcatgcaggacttaaaacctagatgacaggttgatgagtgcagcaagccaccatggcacatgtatacctatgtaacaaacctgcatgttctgcacatgtatcccagaacttaaaaaaaattaggcaagcatggtgtgtgcctgtagtcctagctacttggcaggctgaggcaggagaatcacttgagctggagaggcagaagttgcagtgagccgagatggtgccactgcactgccagcctgggcaacagagcgagaccctgtcccaaaagaataataataagaagaattataagttcaacttgggatatctcaagcttttaaacaagtctagagggtagaggtaaaaagatcatactgctacagtaagctgcatggtatcacaaatgacaaaattaatattccattccctcagccttgttttggttgtggcaaatgtaaaatggccatgaactacgtatcttacagtatttgatatccagtgttagtctttataaacagaatagtaagatttgattgtttctttttcactcctacactggctgggagtttaagtaaaattgtttctggcattatagttctgcatgaaattctttctttttttcatcaatttgctaaaataaaataattaaaaatgtttcagaagtagccaaaaatagtgcttaggctaatagtaggcaatatataccaatgtatagacttagatactggtttcttcctccttttcaacttttcagattatccccttttcctcctcctttttccccatcagtaacatttaggcttgtcactggcccctgtgagcaccactaacacaaacataattcaaaaaggtaaagaggttgtaagttctatcttttgacttctggtttgtgcgggattggcttttttctttcttttttttttttctttttgtgtaaaacaaggtcttgctttgtctcccaggctggagtccagtggtgcaattatggctggtgcgatcatggctcactgcagctgcaacctcccaggcccaagcagtcctctcacctcagcctccccagctccagctactgctaattttaaaatttttgtagagtcagtgggtggaggagtctccttatgttgcccaggctggtctcaaactcctgggataaagtgattctcctgcctcagcctcccacagctttggaattacaggcatgagccaccataccaggttgagattggctttcaagggctccagaaagctatagggagaatgactttaactaaatataagaagaaaatttataataactagaactaactgggcttccttgaaacatagtgggttctccagcattgaagatattcagacaaaagctggatagatgccacttgttgagattgttctagagaggactcggccagtggatagggagtaaaaatagacttctaaattcctttcaattttaagattcttttacttgatctgtgatctccggtttctccattagtcctctgcagcatccctttgtggtaatgtaatattatagaagtaaattgttgtggggcaactgcaagtgatttcaggaagtaacttcaggtaaaggttgttacagaacacatttctttgtcttggaattcatgcatctccaaacgataaggccatagtcttttttttttttttttttttttttttttgagacagggtctcgctctgtcaccaggctggagtgcagtggcgtgatcttggctcaatgcaacctcctcctcccaggctcaagccatcctcccaccccagcctcctgagtagctgggaccacaggcacacaccaccacacccggctgttttttttgtatttttagtagcgatgggggaaacccatcgccttgttgcacaggctggtcatgaattcctgagctcaagccattagttatttttcctgatcctctccctccaccctcctataggccccagtgtgtgttgtccccactatgtgtctatgtgttctcatcatttagctcccacttagaagtgagaacatgtggtatttggttttctgttcctacagtagtttgctaaggatatagtcttatgaagcttattggcagtttcccaacccctggcttttattaagatgatgatatctggccaggcatggtggcttacgcccataatcccagtgctttgggaggccgaggagggcagattgctttgagctaaggagttcaagaccagcctgggcaacatgatgaaaccccatctctacaaaaaataccaaaaagaaaaaaaaaaaaaaaaagatggtgctatctgctagcatatccaatgacattttctcaagtgttgctctactgctaatcagcttgggcaagtgaaccaaacctcaaaggtcatttggggaagccatctgaagggctgacatggcagcgacttcactctccacatttagccactcatttgatccaaaatattcggtaattttccaacttttttttccctttcttttttttttatatggagtttcactcttgtcgtccaggctggagtgcagtggcacaatcttggctcactgcacctctgcctcccgggttcaagtgattcttctgcctcaacctcccaagtagctgggattacaggcgcctgccaccacatccagctaattttttgtatttttagtagagatggagtttcgccgtgttgggcaggctggtctccaactcctgacctcaggtgatctgcccgccttgatctcccaaagtgctgggattacaggcgtgagccactgcacctggccttttttttcctttcttaattaccaagcacagtcaccatctttgcttcaaggttctgttattctatacctctgagatactaggaactagcctggcatggtggcacgtacctgtaatcctagctacacaggaggctgaggcaggaggatcacttgaacccaggaagccaaggctgcagtgagccatgatagtgccactgtactccagcctgagtgacagagatcctgtcccaaaaaaaaatacagtagttctctggtcctttcatgaggtgggttttgttcctctgacattaaattacattccataggacaaaacagctcactatttggcccagagaaagggtaaccctacttttcaagtcatcccacattattttgacatccttaagagaatagcattatctctcatcctttggcctctggttagagatttaaaacctctgctttgccaccatgtgactatacttgaatttcctttagctcaaacttagtatcatctgtctcatcatacatacacacacacagtattttagaaatcgaattaagcttggcttatttactttataggtaaatcaccttctgagcctctgattcccaagagggttggtcttattcacatatcccaagtcatctcagaagttgatggtaacaggatgaccttgagccaagaaggagcacaagattccttccctcttcagcagaagatcttggtttgctctttgatgctcttgatcaggcagttgaaaatcaaagaggtcactctggggaaggtaagttgggatggagcagatggaacggaggtagagatcagaatctgctttgcagagcaggtattttccaaaaggcctatgatacttcagctgataataaatttaaaatggattttaacagtaagaattaatactggtactatataaaaggcacctatttcccttggattgtggttgagagtttatcattaatcctttccctatcctccccttcatttctgcatctctctaggaaatatataaagcccctttcctacattactgtataggttttcgggaatatctacagaagcctgttcaaagattttattgaaaagaggaagaaatagggtattcagataagtttttgcaaacccagactcaggtttcttaaatgattaaaggctataagcaatgtgacttttaagcagcgtttgttctcccttgtttcctaccagttatatgaagcctacagtaaagtctgtcgcaaacagcaggtggcggctgtggaccagtcagagtgtttgtcactttcagggctcttggaagccaggggcattttaggattaaagagaaacaaggaaacccgtttgacaaaggtacaactgcttttttgtgacagtgtttttaattgtcctattttgtagagtgatgctaaagtaaaggtttattgttaaacaagatgaccacagttagttaaacaagtcgttttttgttaggtaaggtttaaggtgtgtaaagatgggagtgtgatatgaatattttttcaagccattggaaaaaaaagtgtttaacttgcttgccttttgtgagaaaaagtttaatatggtagaagtttgtatactgacaactttgcttttgtgagttccccagtgtgaaaaatccttttctcttctttccaggtgtttttcaagattgaagagaaagaaatagaacatgctctgaaagataaagctttaattggaaatatcttagctactggattgccttaaattcttctcttacaccccacccgaaagtattcagctggcatttagagagctacagtcttcattttagtgctttacacattcgggcctgaaaacaaatatgaccttttttacttgaagccaatgaattttaatctatagattctttaatattagcacagaataatatctttgggtcttactatttttacccataaaagtgaccaggtagaccctttttaattacattcactacttctaccacttgtgtatctctagccaatgtgcttgcaagtgtacagatctgtgtagaggaatgtgtgtatatttacctcttcgtttgctcaaacatgagtgggtatttttttgtttgttttttttgttgttgttgtttttgaggcgcgtctcaccctgttgcccaggctggagtgcaatggcgcgttctctgctcactacagcacccgcttcccaggttgaagtgattctcttgcctcagcctcccgagtagctgggattacaggtgcccaccaccgcgcccagctaattttttaatttttagtagagacagggttttaccatgttggccaggctggtcttgaactcctgaccctcaagtgatctgcccaccttggcctccctaagtgctgggattataggcgtgagccaccatgctcagccattaaggtattttgttaagaactttaagtttagggtaagaagaatgaaaatgatccagaaaaatgcaagcaagtccacatggagatttggaggacactggttaaagaatttatttctttgtatagtatactatgttcatggtgcagatactacaacattgtggcattttagactcgttgagtttcttgggcactcccaagggcgttggggtcataaggagactataactctacagattgtgaatatatttattttcaagttgca

SEQ ID NO: 551 - DNA, 33190 bp, Homo sapiens
cccgccctccccagcccgcctcagggaagcgagcccgggcgccggcgggcggccgtcgcgtctgacagaccactgcagaccacgggccgaggcccagcgcccgtccgcagcgcggccggcatggcggcgacaaggagccccacgcgggcaagggagcgggagcggtctggcgctcccgccgcaggtgagcctggggccgggcggggcggggcggggggcgcgagcagggaccgtcaaggcgggcggggtcgcaggcagccagggacgcgccctcctcggcggccaccttcgctgcctgttgggggctgggaatcctggagcccgggagctggagcgcgcccctgagccgggcgggagtggggcggggctgcacccccactcggggtcgagccgctgtcggggacggggtagcacttgaataagggaggccaagctgcttaggtcgcctgcccgggcaggaaacgcaggttcctggaagaaagccggtctttggggtcggggtcccctcagagccgcgcggggagcccaggcagcggcggaggtcgcgccctgcgcctgggagcgagcccggggcgcgtggacccgcggggccccgtgtcctctcggggagctcgactcgctgacggagggagttgcgtttcgcgccctgctggcagaggatgtggcgcacaccttcgcggcagtcgagacttgctaacaacacagaatactctggctgaaaaaaaattcacccagacggggccgggcgcggtggttcacgcctgtaatcccaacactttgggaggccgaggctggcggatcacgcggtcaggagttcgagaccagcctagccagcatagcgaaaccctggccagcatagtgaaaccttgtctctactaaaaatacaaaaaattatccgggcatagtggcgagtagctgtagtcccagctactcggaaggctgaggccggagaattgcttgaacccggcgggcggaggttgcagtgagccgagattgcaccactgcactctcagccagggagacagagccttgctctgtccaaaaaaaaaaaaaaaaaaaaaaaaatcacccgacaagggcagcagcacagcctgggagttcagtcaggtgctgggtctcgacgtctccacccgctggctcggtagcggggtcctctcctaaccagccccgagaaagatgagcatagctgctgcttggttttgaaggaacacattcctgtgtctatatttgtctggagcccactagtggattttgggaggattccgtttcccaaacacacagtttgggctgcaggaactgcagtgattatggcaaattggcaggtgcggggattgtttatgaattgctgtttttggtcccagcttgagcttttaattcacagagcaaactgttgggtgcagtggaaacagcacctttctgggagtcagaggacatcattctgatgtgtcctcatccataaaatgagagcctccagttagctgatccaggcagcccctcccagtggagaagaactctgtcctacctcccactctcaaaagtttggagaatgaactcatttttttcaacctttctgcaccttgggttattataaaattagccacatatttcctatgggtgtattcatttgaactttttattatgttattttcttttctcctccctgccttagtttggcagagaaacaaaaattggaaatagaggcaggagcacagctggaaaggctggtttaggaggcagaaaggtgccttctccaggcttaacatcatcacccggaatttttcctttctttgcaccaaattcaatgcatgccagcgctgcgagcccagggagagattctttcctctgctccaattgtgggatctgcagttggtgtgcagcagaggaagaatgtgattcaaggatcagattatggaaaacttttttctccaaaacataacttctgatgacttacaagcatagtttcccttctttgccagtggtgtttggcaaaacaaaaataaaaccagttttaaaatcagttgtcaaagctagtatagggacaacttttttagcattcgaaataacagcaagtaacacttgacagtaaaaccagacaacagaagaaaacccacagaagaggtttttttttgtttgatttttactatttcttctttaaagtgttagggtatgttaggatattgaaaatcatggactaagcatctctgcataatattatcggaaagactgtctgaatcagaatgttagatgcatcgaagaaacattggaagatcacttagtggagtgcccagagaagatgctgtcatctattaggaaggcagggagaagtggtcatagagtggaataagctcacagtcgccagcacaccttaggcaaaccactgtgtttgcagggagaatgtgtgcaccccacactcttccttgctcttcccacatctggccagactcgggccattaactgtctttattggctcagctctgctgtggttctctccaccactgtccatctgttcagtggtaacattcacatttcagccatgatttcaggaaccacaggactcattggaggttcttaggggccggtgttgggggaataggaatgcccagtgtggaacggcgcacccactccagctatacttggagttgctctgctttttttgtttctgtatacttttatgtttgttttgttgttttttgctgttctaggtgaggttttgtttggaggaaagagtttaatgctaaatcagaaatgtaaaaataatggtaatggctaatgttttttggtgcttcttgtgtcttcgttcatttattacacggaaaatgcttagaactggttggttgtggttctgagtaagcactcaaatgttagctgccactactattattaatattaccttctactatgaagtagctgttattttttaaccttatttgaagaaaccaagtcacacacaaacttgtacaaggttacccacctcctatgtagatgtgtctgctaaatgaaagatatattcctcgatatcctggattttgttaatccaaagccattcaagtaggcacaactgtatgtatgaagcagatgtttctgagccaccataagcaggctttgttgtgttcccatgggcagtggcaggtaatcactaggcaggcaggtgaatttacctggtggaacttctgtgatcaaaaggtgagtaggcagatggaactgttaataacccagtgattggtcgggtggcaaaaggagcgatgagaagtgtgggcgcaaacattccctccgcatgcactgccaaaagtgtgctgagaatcgtgaccttattctagaacaagtgccttcaaggtctttactctctaggaggagaaggaggagtagagggggcgctggtggtagaaagtgtgtgccaaggaaaagaggcctgagagctgctagttacaactagcagctgctagttgtaactgtcgagagaaatatttcccttctttaaaaaatagtttgagggctgtgggggaaaaaaagcattgcagttaaaggcacccacaatagaatgcttaaaaccaaatggtccatagttgattttgttgttgttgttttgccacccatttgtcctattgtacttctactcttacatttctatgagatgaataaatatcaaatagaatgtaacttttttggtaccaagtattttatctcagtagaaagtcttgactgggtataattattaacttgaaaatgaccttttctctggctcgggtctcaaggtagacttagcttcatctgggaggccttggctggctccctggcctggagtggtgtgctctcctgtgtgcctgtagcacccagtgcttgtccctgtcacaaaaacagttggcatttggattttctttagggtgctagatgcggagacactgaccatagataatgttatataatctttacaatcaccactctgtgacgctcacaacggctgcagaatttgctcaaggcttccgctagtaagtggtggccagggtaagccctggcatgggactccactcataacagattcttaacaatctgtctgcttctgtcacgtgaaacagagttctagcttctacctgagagctcgccatagtttccaaggttaccttattacatttaagctgttctgaattaagattgggttaacatttgtatactgttgttattgtttgagacaactcttgcaggtctgggtacaggaggagagagattatgaaaaagtttttattactgggctaaaacctcctagcttagtggttccccatacatggctattaaagtctctacttaatttttagaggaattattggattaatatgtttggttagtaaatccttccattctcttctgtccatgtgtgtcctctggtacatgttcagctacttggtaagacaatctgttttcaaaatgaggttgcatacacatttatctgatttgtaattaatttaatggaagaacatttaaatggtgcttctaaataaatcaacagaaagtttttgtatatgttctcatttttctagtaactttttatgctagtaatagtccatttttctactttcccatttagttggagccagaatagacaggtggcctcatgtttaaattaagaggatgataaaatgcttatgttcatttctaggagacaaaagcctgttgcctgttagtactgttgctgggattcctaggtaataaacaaaaatcccagaaactgtagcacataaaatgctatgcttgatgaatctctaaattaagaatttaatagtaaatcttttgttgttgatttaaccatgttactatgacatcaagtctgtagaattattggatagacacaaagttacctaaaatacctcagctctttctcctcttgccatattattggttattaatgaatattagggtgagtcttctaacagtgggagtgataaatacctcagctctttctcctcttgccatattattggttgttaatgaatattagggttagtcttctaggagagggagtgataatgtagttggaagtcattctcaagagagtcttccctcaaatcggaagtgaaaatctcattaaacatcaagcgttcactgtttcaaaaaaaaaaaaagaagcatacctccctgtcctgtacccacgacagtggagatgagctctcatctctttctaggcttgggacagcctcggtgggtacaaaccagttccaaatggctcaggaatggaggtgggcagtggagctgatgatggtggaagctcatcggagcgtgtactttgaacagtctgtgtctgtcctctaagccagggcatagactgttctctgtagcatttagtctccaagtttaagagaagtgaactaaattccttcttgcctggtaatgagagaatcggtccctaggtcttagaataacacctgatactttggggttgtattttttgacctgtgacgagaaggcctcaacttgcttgtgaactctctagagttaagaaagactgggtgctgtgtgtcttccgaatgcaccacgtggacaggtcgaaatgctgcggagcaagcagaatggctgataggaaggggaagtggaagagatggcaagccagtgccagcatgggctgaatgtaaccagtcactgtctagataggaagggctggtggcactcatgtcagtggatgagatcagcaatttgtcattttacttggcatttacaaaatgaacttggagtttggtttgtagctaaagttaggttggctgctcagcttgaaatggaaacatagccaatgaaatgattaatatacatgttgggtcccacagttttgtacctgaagcagtgcaaggcttgggcatattgattccttcctaggagatctaaagaaaaatcccttgaatcaagagagagcttattagatcagttttatccatggtatatccctctatttttgttttttaagtattaaatatttgttagactcaattttggtttgttgactgtcatgatagaggacttgcagagtctgtgcttggtgacctaccttgtactgtcttgttcttcacactttgctgcatcttctcccatatgtaattgattcatttgtttgaattttgaattttggagcctattacatctccctttccctcccagtctccttgatattcccttttcctccccatttagcagcctttttgaagctgattaccaccatggaggcccttgtggaaaaggctctttattagaactagcctttgggtcgacaggtttaatagatctgtaggacccagcatgaacttccaagggtcggggtatttgctggcatttgtcaagatcttatgtatcttccatacacacttagggcatcttttctgtggtgcaagctttgagtaatgttttgagtttagttgaatgtcagttatttcacaactatttccaatcctggccccaacgtgactattcctccaacataactctgaaacatattaaaataaggaggcctttggagaatgaagggaaatggcagttaatggcctggcttccttatgtttgctcacaggggaggaagctgaggtccagatggctcagctgtctaggaccggaccctgagttcctgactccctcagttccctcctcatttcactaccttgaaaccatcctactagatgaccacttcacattctcacttcctgctttatatttacatggtgtaattaagggaagagaaaacacactggtggttcattatttctgacatacatattaaaagtcagaagggaccaccaggatagaggctcttagttagcataagtgtggtggagtaacagaacagccccaaataggtgaatacatttatttctctcacatcaaagagaggtagctccccagggctgggatgatctccatggtgtcagggccccaggctccttccactttgtttctccactatgcctggcttcaatgctcactgtctcttttgggtacaagatggctgctggagcatcagccatcacatttacattccagctaatagggaggaaaaagggcaaggaacacacccctcttaacaagcccttctgaaagttgcacattcaacaacttcttggccagaattcactcacacagcagtacccagcacccagggacgatggaatgagcctttatctgagtagccatgtgcccagcccaaagtcagggcttaatctcgatgggaggagagaacggaccctgggggaagctggcagtctctctcatggagacacatggacgggatcctgattacatgatacatttcgttcattcaagaaatatgtattaactgtctattgtgtacttaggcactcagaaagcagagtgaaaacagtcagtcccagtccttaaggcatttactgtctacgcagggagacagacgctaatcaaacacaaacacaattgtgtaaactgtgacaagtgctgtgaaaaggacaccgtgtgctatgagagaggaaaacagggatttgctcaagcctggaggttggaaacagagaagtgatgtttgagctgagagctggagaatgagtggaatgaactagggcatggttagaaggaagaatgtttcagacagagggaagagtacaggcaaagcaaggtagggaggcaggcgtgagctctaggaggaagtgaaggcactcctcctattggagcaaggggaggaggtgagagaagagggaggggtcagggtcagaccatgagggggactgggcgtgggtgaccaactgtcccagcttgcctggactgagagatgtgccagtatgtggggctttcagtgctaaaactgggagagtcccaggcaaaccaggaggagttggccaccttccctggaggccagggtaatggtcaggttcctttctttattaatttcagagaagttggccaagcacggtggctcatgcctgtcatcccagcactttgggaggccgaggtgggtggatcacttgaagtcaggggttcgagaccagcctggccaacatggtaaaacccctatttctactgaaaatacaaaaattagccaggtgtggtggcaggtgcctgcaatcccaactattggggggctgaggcaggagactcacttgaactttggaggcagaggttgcggatcatgccactgcactccagcctgggcgacagagtgagaatcaatctgaaaaaaaaaaattttttttcagaaaagttcctttttagataggcatagcttccagccatagaaaaacaacagctgtgactagtaaaagtaaccgcttactttggccaaagggaaatgggcacaaaacagacacacaaaacagacacaacacttacttttagttggattacttgaccagtaagatttttctttatctggactgatttctcctaatggtaactttggaaattgattggcatctgatgatgtatttgagataacagaagcagctaagggtaggggatgctattactctacagcaggatttctcaacactggcaatgttggaattactggggagcttaaaaaagatacctgggccccagcctaataaatctgaaaatccactggagccagggccagggtcctgggggtcttgatggaatgcagattatgtttccaaggggtttgagaatctatagttctaagaagtcccagatggtattgatgttgctgtcctgtggactttgagtagcaatgttctataaagtttgatgaggttatttttgaagccactggtctccctttaggagagcagatctataggcccatgtaaaggtatatgagtccatgataggagacaggggttaaagacttagggcggggaggtggccaaggaggcttctgcagtgtggtcccatcagcaagatcacactgaacccagggggacaaatcttgacttctcagttggtcccaggggatgggtgagaggttatgggttgagttgtggctttataagccactgactgtcactactattcttggttacagaagaaccagctcctgaggtctctggctaggatgctactataggtaatgaccattttttacctttctgacaatttgttagggtcctttccagctgacatcaggggctagcaggatgtgggtctttcctacaaatgagaaaagccatggaaagagttttacattgtaaagagttttgcattgtaaagagttttgcacaggagatgatacatccatcgaatgtttaaaaaacaaacccacactggctgtggagtagaaaacagaactggggaagggagaccaatcaaaaggattagtaactattagtgatggtgcccaaatgattctgagtaatggaaaagtcacccccagggcaaaaggcctgagagttgaaccagaccacgtgccaccaaagccctggcaggtcaaagcagtgagccaaatcagtaatgaaatctagcagagataaatgtcaggtcctgcctgggtctaaagatcccagaactggcccacatgatctggataatcctttgtttcccttcccatgttctggactgaaaggtagatacagatgtcagagattaaaaatatatttttctaagtcagctcagtgacataaaatccacgtgtcttagttgtgtggccagttgggcttgctagcagtgcccaagctgaactccatcctaaagttctaggcctccctcccaaggagagggcaggcccaaggattccttctgtgcgggcaggtctgtggggtgaaaggggctgagctgggcatgccattttaaaaaaatctgccactcagatcaatctctcaccttcaggaaggagtaaaggcggtagtaggggagccagaaccccacctccaggaaggcctctccaccgggaaacttgagagtgagtgaaacccctggccctctcttcccttcagaagatggggaaacacaccccagcacaggtccaaagggctttaagctgacagcaggttgaatgtgagtcagtagcttttgggttgtttgtagctgtgcagtacaatcacaggctgcattgctgtgaatgtatcatctaaaacagggtcagcaagccacagcccatgggtcatatctggcctgctgtttgtttttacatggcctatgacctcagagtggtttttccatttttaaatggttgggaaaaaaataaaaagaataccacttcctgacatgtgaaaattagatggaatataaatttcaatgtccatacataaagctttattggattggagccctgtgtgtattgtctgtggctgctttccctgtgtaagggcagagctgagtagttgagacagagaccacatggccgatgagacctaaaatatgtactctctgacccttttcagaagacttacccctgatgtagaatgaagaatgtggtcaccttgttgaattctgtcctggggatcacacccaggacattgtgtttgacctggggtctcacattaagtgtggaatgagtttagagaagactgaccaggaccacgaagagactccccaaagatatcatgtagggactggttgagaaaacaggagctgtctaaactataagagagaaagatgcagagtggaaatgatggaaatgatagaacttcgaagagaattactcaggggaaggcagtaatgtacagtggttagttcagagggcacagctctacatcaaaacctgggtgttcaagttcagacttctacttcttttctgtgcttcagtttcttcacctcaaaaagtgaagcattcctgttagagctcatcagatgaccagatccacagtgaattaagattcagcatttgccttagaggtgttagtgggaaacagtcatgaatacactgaactagcctgcagtgtggacatattgctgagggagcactctgggaagcctaaaaaacaagtagaattctgcctttagcccaaagcattctgcaatcccatgaaaaatgtaaaaggtcgtcatatggaagaggaatcagactggttcttcataaccccaagcaatagattccagggtggttacagatctgaacacctcaatctcttgcttaaaactctcagagccttcccttgctcttcagttaaacatcagcctcttgaacgggaccttcaggcttctccagcctcccctcactttccttgccttgcaagcccctgtccaaccttggatctcagctcagtctcatgtcctagggaagcattctccaacttcgtttagctcagattcccttcttacagtgcttgtggacctgcattcctttcctctggagcgttgcctcagtggtgctctgttcccactaggagtctgtctgttagtccctgccaggagaatccagtcggttgcatttataattgtagcatcagctcttgacactgtgcctggcctgcgggaggagcttaatctatgttcgtagaataatgatcaaagttgatcaataaagagagaaacattccaaaaaagggaaaaaggaaatggactcccacaggatggagcgagttgccagccgagaggtatgtaagcagtggttggatgacagatggtgggagatggtagccaaatggtttatattcagatagtgcttttttgtttaattttgttccaaccctgtgctatcaccactttttggccattggagtaccttcttggggtcatcaaggctaagtgattagtcctctagctagaaaatgacagaatgaagacaagagtcctttgctcatttttgtcgaatgagttgtctctcccaggctgaggaggcctgtgtggttggataaagcagtggcagtgctggagttctgtgactccacggggaaggaattacaacttcctctttagtagtagcctatcccatctatagcttttgtggttttatagttgggtggatttttaaaatgcaatgattagaaaatgaaacttacctttaaaatgatgggttgcattcaacatctctagaagatgtgcccagtcaagagatgtgcccgactctcagctgtgatgttactaaagaaaacacacacacaatcctctcagtgtttggccaggagcagcttcctgtcatatttattgatactttcagtttagtgggcgccttgggggcagtgtgccccatcctggggggatggtgctgatagcataagtgggttgcatgacagcctacagttgaatgtcttagtggtcatgactttcaagataaaatcctcccacttggtggttctctttctcagtgatattgatcttgtagttgttggttattgtattctactaagtggaagactgtcatttcttattgagcagaattaataactgaaatacaaaagttcagatggtcctttgagtttaaggatttattaagagggtgttttttttctgaatatctcccccgtaactggtagaaaaacaaccaactaatctatgattttgcaagaaccaacacaatttaaacttactctttcacactgctgtgctaacttctagaaatctcttgaatctccatgtgctccaaattatttagaaaacttgatggcctaacaggatttgttctgtgtgtttttccttctgtttgtgtagtgcttaatttatttgtttagactaatgtacaatattttgctttattctggagctgagtttctcagaattaaacaatcagttcccacactgaaggctcccagcttttccctgcagtcacactgaggcctaaggagaaactaaaagcctatgagagaggtgacctactggggaatggaggtgctcacccaaccagctgacaggaggacactgtgtccccaggccagggggtccctgtgggcagggaccgtgtcttgcacttcactgcctccctgcctggcatccagcccaggggggaagaagtgtgaggaattggtgaggggtctggggaagggagcgggcagcccttcccagcccgtccctgtctgcctgttccattggcttcagtttattcctctgtacagcacttcctgcccttgattacaaatgacctaaaagccatattcaccttttcaaagggagcagggttccatggcacagctcagaaaagtgtgaagtttccccagcacctcaggagtctctgtgtcctctgcttgctcacccacccccatcttcctacctctcttgccacagagtgtcctttctcacccctcccttgagttccttcctattccatcagcctctcttcaccactctctcttccatcgtctgctaactaaccataataggacattgaagcagatagaaatacctgttgtgtttattaaatgtagtacttctaccttaagttcttttagccaggtgatttcactgtatgtatatttcttcactttctctgcgacctcagacatctaaattaaattgcctttatgtcctcccagctcagagttgatgtccctgctccctggcctgctcagtagcccttgaaagaccacctctgcttcaggagaaagtcagtgggctagatgcaggtgacagagtctgtgtgtagagagaaagtgtggaggtactgatattgtatataccatgaataagatcaggagaggaagtagacaaggttgaggactatgcagctggcccatgaggaagtagagatagtacagattctggaagtttgaggcaaaccagacgctgctgagtttccatgagatagagagactgtgatgtccaggacagtaggagcctcaggctcctggggtagaactgctgtttgcacgatcacttggtttccggctcttcagtgtcttttagttttgttttcagggttttggggtatgtgtgtgtgtatttggtttcctgttttaatgtttgaattacttcagctttggtatattgtagagaatggaaaaaaaaaaacactaagtagaattttaccaccaaaaacggtgctttttttttttttttttttttttttttgtgtagttctgaccaacagtctcatctgccatatatcgtttgagtgatcacagatcagattttagtttctgatattcactttgttgatttcaggaggtcctggtataattcctctaggacatgttcactgctgaagcattacttctgcttgtgtgggtcggggtcccaacatgcattaatgctgatgactagggggatgtatgagacctaggtaatacactttgcaatataacagacatgcattgtgctgtatgtatggtctcatttcagccaccacccaagtggttcagcccaaaaatattgaaaagaaatttcatgtttttgtgtatcttcacaggcattaaagaggatcaaatccataatttctggcaacactgctcttttccacttccccttgcaacttccttgtggacttgtgaaacttcactgtggacctgaggctcctactgtcctggaagtccccttgtggactttctggagattttttttgccaaaacttgtcccctcccaacacactcctttttgttctttttttatgtagaatgactgaattcgtggaggtgaaaccttttctcccttcctgtttctctgagtcccaatcaccaagccttccacaggcatccctctccagggatgaggcgggaaagctgggccagggactgcagaattctccttggcaggctggtggaagggggacccctatgaaccttctgatatccacaattttatctcagttgtatttggggaaatgagatttgatgctggaggtcatcagaactgtcattatgacactgttttgcaagatgtctcattacggtgttttcttctgtatcattttttagttgtaattcagttattagcccaggaaggataattttttttaaattttccttttaaagagtcttaatttacttgctatagcaatattaatttgaagatttccttggttccctaattcagaagcaggacagccaagtggtaaaggaggcaacttctggcatcatgtttttgttcattttctgttgttataacagaataccacagactgggtgatttataaggaaaacaagtttattcctgcagttctggggactggggagtccaagagcacagcaggcaccagatctggtgagggccttcttgctgcattgtaatgtggtggagggcgtcacgtggtgagagggtattagcatgcaggtcagccaccagtcctgtcatgggggccccatgctgatggccttatctaatcctaattatttcccaaaggccccacctccaatcatcatatgaattttgtgattaagtttccaacacataaaactaacatgtaggacacattggggacacattcataccatagtatatcacattgctcctgtttttgaattctggctcttctacttactggccgagtcccattgggcaattatttaatgttttccccctcaaagttttctctgcaaaataagggttactagagtaataacaataaaaacaataattcgtgtttattgggtacttatggtgtgtgtcaggtatggtgccaggtgctttcccaacatttactttcagtctcacagcagccctgagaggtggatcctgctgtgcctcctgtgttgtgatgcagtgatgatagtaagagtgaccatgcactgagcactcactgtgcaccaggctctactatgtgctgtcttcattcctaggttcagaaactgaggcttagggaggggaaatcacttgccccatatcacatgctgcagtatgcagggccagcatggggaccatgttgttagactctagagacttcttactgcctgctccatggcatggtcataggagtaaatgaattaattcctgtagaacacttaacataggggctggcacataataaaagcttaaactgtagctattgtagctattggtgaagtcatactctttcctactaaaacgcatttctcctttgatagagaaggctcactcctaatgtcatcagtgaacagctcgtatagatcctatacatggctatacggccatggcctgcttccatgtgacttcacaagtccaacagagtacccttccatccacctccagatggttctctggtacccacaccagcacccccatgaataggctccctggcccttcttggctgcagttacttgacaaaacaatgtggacacattgggtagagggagaccaggagtacaggcatgtgttctaggtttttttttctgacgggttgatcatatcacaatctcttggattgtaggtggggttgagatttgagggtaagggcatgtggtaggaagagtatatgtgagtggggagagccatggtctgtagcgggtccccatggaggcctgggagctacaagagaggccctgtgctcaagagagatggcccagcttcagggtctcacctcaaattccacaggggctagttggtaactgccaactagtaggttcctgggttgtaactgcagcaggttgggtggagcctgcgacagacgagagcatgtgtccgtggagggggcagcagccatccccacttcagtgactgcaagcccttcacatccacccacaagtgagcaccaccctgtgggaaataggcagatgctttcaaaaggccttcagagaagaagagatgtgaacagccagtatgtacaggagagctttccttgtaaatggagcctaaagtgagaaatcacaccagtactggggtttagggaagtaggtgctctcgtgtatgtgatgagagtctgtggtagtgtctgtcaaaactgaaaatgtgcacaccctgtgacctagaattttcttttcttgaaattatcctattaaaaatctaccacaaggactgttagaaaagcatatttgccacagcattgtttgtaaaagtgagaaatgggaaatgatccaagtgtttatcaataaggcagtgttaggctgaggcgggaggatggcttgaatctaagagtttgaggttgcagtgagctgtgatcatgccactgtgctccatgctccagcctgggcaacggcacaagaccctgtctcaaaaaaaggcaatgcttacatttaggacagtttatactgaaatattatgcatcattaaaaagaataatgtagatttatgtgtgctgatatgaaaagatgtccaacttttataatgaggaaaaaactaaaatcatgttatagtccatttttctaaaaaacatttgtacctacagtaaaagaaagtatgtatcacctgtgtaaaattctagttcttccatgaatttaaagcttcactaaaaatatttgcttgtgtcagaatttttaaagttgaaaaatcaagctaaattaataaaaatctaaattatagatgtaaaaggcaatatagcattacatttttaagctttcataaaaagttttactaaatgtctaggtaagaataaatatataatgatttgaatagctaattaactgttctaaacagataagcacttgtttttgaaaatatccttttaagtaattgtaaatgtatctttaaaatttgctattgttggccaggcgccatggctcacgcctgtaatcccagcactttgggaggctgaggtgggcgggttgcctgcggttgggagctcgagaccagcctgaccagcatggagaaaccccatctctactaaaagtaaaaaactagtcgggcatggtggtgcatgcctgtaatcccagcaactggggaggctgagacaggagaagcacttgaacccgggaggcagaggttatggtgagccaagatcacaccattgctactccatcctgggcaacaagaacgagatttcatctcaaaaaaaaaaaaaattgctagtgtttttttctttatttgctggcaaattatttctttataagtgtaaatatcacatcaaatatccagatgataaaaactgtcaaaattttagattctacattgatgagtcttttactggagttaatcactggaattttactaaattatgtactgtggaggaaattattttgcaatgaaccccagaggtttggtcattattcaaagtcctctttctcatttgtacttcagcattttatgtgctcaaacataataaggaatctactgaacatagcaaaatattacaagtgcactgtttgaactctctagtcctgttagttttctcttttgtcaaatcaggaatcacagtgtatatcatatgcagcatcactaaatagatctcatgactccttttaagtggtctactttctggaaatgatatctatgtgcctgctgtctgagttacttgctctgtgctgctaaagtgatgccatatgttatggcatgcaatgtttcaaaaatatataaatgggcagaagtggatattggagactgatatggtttggctctgtccctacacaaatctcatcttgaattatataatccccaagtgtcatgggagggacccagtgggaggtaattgaatcatgggggtggttaccctcatgttgttctcatgctagtgagttctcacgagatctgatgggttttataaggggctttccccccttttgcttgacacttctcctacctgctgccatatgaagaaggatgtgtttgcttccccttctgccatgattgtaagtttcctgagacatcctcagccatgctgaactgtgagtcaattaaacctctttcctttataaattacccagtctcgggtatgtctttattagcagcatgagaatggacgaacacagaggcgtctctggaggcatcgctagacgtcacctggtttgactgcctgcagtgtatttgggtctggattgaatccctgtaattgtgtatgggatccaattcagatattcagcaagaaccaagtgtgtggcaggcattgtgctagtgcttaaaaattttgttccacctttccctagccaagtcagtgttttcacactcattgtacagtcaagaaaattcagaagaggagttaggttgccatagtcacacatcaaatagtagaggcaggttttgagttcaagtctgagagattctgaagcccatactctttattcttcttaattttgtggaacaaagatggtcttgtatatggtgctgattatgggagaaccataaagaaattaaaaatttctttaatttttggattgaatttttaaatactttaaaaatatttatgtaaatcagtgatagatactttgcaggtaaaattatgcaatctctctctgcattttttttctcttaaagcaaacttgtgtaattgtgatgtgctttttttttttttttttttgtaattttcataggaagtgaccaagttcactcctggatgctagctacaagccaagccttagacactgtctggagaatggcaaaaggctttgtgatgttggcagtttcatttctggtggctgccatctgctacttccggaggctacatttatattcagggcacaagctgaaatggtaggtcactgtatcatccttaaatttcaaatgtatctttactattcaaagcagaattctgatattattgttcccttttatctttcaggtggattggatatctgcagagaaaattcaaaagtaaatattttcattcatttatttctttatttttaaggtgcagagagggttcaagaagggagaagaaagggagaattaacagctttttattttttatttggtccagggaacctcagtgtggaggcagaggttgatttactcagttattgtgcaagagaatggaaaggagagacaccccgtaacaagctgatgaggaaggtgtgtctgtttttagagggtatgggagaaatagagtttgtctgtcaaaatcaggaaacaaacattcccttctgctttactaaatccagatatccatcagtaccaaaatgtgagtcaagtaacaactgtggctctaactcaaaagccaaatggctgttagaccttggctttgggcttttacctggagctcgtgccctcaagggctcaggtcgatgaggtctgtaattccaggaaactcaggcattgtgccttttcagcaccctcctggccaggcctattaaacatccgcatgtgcagtggagactgtctttgaaaagatcaggcaccctgatgtaaaatattttgaggatttttagaatttttattggaccaatcttggtaaatatccccagcagtgctgcccaatcttgccactagcaaaagcaaaaaagggtggagggagtacatataaagtacttagcatggtcctaaaagtatacagagtttttcactgtggttaggtcgcatcccttatctgcccaaggtgaccttccctggctctgcttccaggatttatcatctaaaatacacttgtacaaatgagagtcactttaaaattacatgcggtcatattcgtaatttatcattgtttctgttgtccactttagttgggaggaacacctcactgaaaatacagtgaattcactttattttcttgtccagtggaattaataaacaactttctctttttattttattaggcttatgaggagctattttggcggcatcacattaaatgtgttcgacaagtaaggagagataactatgatgctctcagatcagtgttatttcagatattcagccagggcatctcttttccatcatggatgaaagaaaaggacattgttaaggtatgtcttccccctggaaatgtgggaaatgtcatgttgacaataactgcaactcagactcctagtctttgggggctttgtactcagatgaccatgagattgaagagatttttttgtttttttgagacaagatctcactgtcacccaggattgagtgtagtggggtgatcatggctcaatgcagccttgaccttctgggctcaagtgattctcctatctcagcctcctgagtagctgggaccacaggtgcatgccaccacgcccatgtaatttctgtatttttttgtagagacagggttttccgtgttgcccaggctggtcttgaacttctgggctcaagcagtctgtccacttcctcctcctagagtgcttggattataggtgtgagccatcatgtctggccagaggaattttaagaggccatttaatccagtcctctgtctctcatgtcagttgcaaataaaccatctcagaagatagtcattatctgtgtttgtttttaatgccaccatcttttcttgaggggcatctgttcttttataagtaaggtgatcaagcaaaattcacttttttactctatagttaatgagagttttaataaatgcatagtttgtgaccaccccaaagattctcttgtatactttggtagtccatcctcctcctaccccagcccctgaaaaccactgatctattttctgtccctatagttttgctttttccagaatgtcatataaatggaatcattcagtatgtagctttttgaatctggtttctttcacttagcacaatgcatgttcaattgaatgtgtctgtgaatttgtatttcatccttttttattgttgagtggtattcctttacatgaatgtactacagtttgtttatccattcaccagttgaaggacatctggattgtttttagtttggggcaactataaataaagtggttataaatagtctcatacaggatgttgtatgaacaataggtttcatattgaggggataagtagctaggagtgagactgcctgcttgtatgctaggtgcatgtttaacttcataagaaactgccaagctgcgttccaaagtggcccagccattttgtattcccaccaacaatgtataagcaatgtttcagttgtttcacattctcaccagcacttgatattgtcaggtttttgtttttagccattctaatagttgtgaattggtatcattgtgcttttagtgtgcattccccaatgagtaatgatgttgagcatttttcatgtgcttatttgtcatccctgttatcttcttggagaaatggctattcaaatcttttgctcattttttatgtttttttttaaattattgagtcttgagagttctttattctgaatacagtgctttgtcagatatatgatttacatatattttctccagtctgtggcttctgattttcttaacaatgtaaggcagtgcattcttgataagtaacctgagtttttattttaaatgcagtatgtctaatataggaactacatttaaggatagaggtgcaaagaaatataaaatatgtgtgtgtgtgcgcacgtgtgtgtgtgttcaattttcttaatatcttttatttaaacttgtttctattagttccatttcatctagcaaatgcttgtcaaatatatgcaatgtgctagcccagttgctaattgctgaggacaaagatataaaaatacaacagaggccaggagccgtggcttatgcctgtaatcccagcactttgggaggccaagttgggagtatctctggaggccagtagtttaagaccaacctgggcaacagagcaagactccatcttgccaaaaaataaaaaaatgtagccagacatggtggtcatgcctatggtcatagttacttttgggagactatgatgggaggattgcttgaccctaggagtttaaggttacactgagctatgattgcaccactgtactccagcctgggtgatagagtgtgtattagtctgttttcatgctgctgataaagacaatcaagatgatatttgggtggggacacggccaaaccatattattccacccctggcccctcccaaatctcacatcttcacatttcaaaaccaatcatgccttcccagcagtcccccaaagtcttaaatcatttcagcattaactcaaaagttcacagtacaaagtctcatccaaaacaaggcaagtcccttcttaaggtatgtcttccccctggaaatgtgggaaatgtcatgttgacaataactgcaactgtaatcaaaagcagtttagttactacctagatgcagtggggatactgggtaaatacagccattccaaatgggagaaattggcctaaacaaagggactacaggccatgcaagtccaaaatccagcagggcagtcaaatcttaaagctccaaaatgatctccttcgattctgtctcatatccaggtcacactgatgcaagaggtgggttcccatggtcttgggcagctccgcccctgtggctttgcagggtacagcctccctcctggctgctttcacaggctagtgtcaagtgcctgtggctttcccaggtgcatggtgcaaggtgttggtggttctaccattctggggtctggggaacggtggccctcttctcacagctccactaggcagcaccccagtggggatggggtctcagtgtgggggctcccaccccacatttccctttcacgctgccctagcagaggttctccatgagtgcccttcccctgcagcaaacttctgcctggacatcaaggcatttctgtatatcctctgaaacctgggtggaggttcccaaccctcagttcttgacttctgtgtacccacaggcccaacaccacgtggaagctgttaaggcttggggcttgcaccctctgaaggcatggccctagctataccttgcttggccccttttagtcatggctggagtggccgagatgcagagcaccaagtccccagactgtacacagcagagggaccctggacctggcccatggaactgctttttgctcctaggtgtctgggcctgtaatggggcgggtgggggggcgtggtgcgggtgctgctgtaaaggtttctgacgtgtcctggagacattttcctcattgtcttggtgattaacatttggcttctcattagttacgcaaatatctgcagccagcttgtatttctcctcagaaaatgagattttctttcctatagcattgtgaggctgcacattttctgaacttttacgctctctctttcaaaactgaatgcctttaacagcatccaagtcacttctgaatgctttgctgcttagaaatttctttcaccagatactctaaatcatctctctcaagttcagagttccgtaaatctctagggcaggggcaaaatgccaccagtctcttcgttaaaacataacaagagtcatctttgctccagtttccaagttcctcatctccacctgagactacctcagcctggatttcattatccatatcattatcagcattttggtcaaagccattcaacaagtctctagggtcttccaaacttttccacgttttcctgtcctcttctgagcactccaaattgttccaacctctgcttgttacccaattccaaagtcgctttcatgttttcgggtatcttttcagcagcaccccagtcctggtaccagtttactgtattagtctgttttcacactgctgataaagacataactgagactgagcaatttacaaaagaaagaggtttaactggacttagagacagttccatgtggctggggaagcctcacaatcatggcggaagtcagaggagcaagtcacattttatgtggttggtggcaggcaaaaagagagagcctgtgcatgggaacgcttctttttaaaaccatcagatcttgtgagacttattgactatcatgagaccagcacaggaaaaagacttgcccccacgattcagtcacctcccaccaggtccctcccacaacacatgggaattcaagatgagatttgggtggggacacagtcaaaccatattaagtgagaccttgtctttaaaaaagaaaacaaaacaaaacaaccacaacagagattcccaggctcagcaaactgagtaggatgggaaaatgtattggatacctatgatggattagactcttacatacaccataatcttatttaatcctaacaagagtcctataaaatgcacagtattattggtatgttacaatggaggatgaggctaagaagttaagtaatccatgccggttaagtaatctctcagctggtgagtgacagccaggtgtgagccacagagtgcatcattctaaaatccacctgttccctgatgtaatatactgccctaacatcatttggttaaaaataatttctaaagggctacatatagtaagtttggtaactattttaacaaaaaagattgtttctatggacacaattctatgttttcatcacttgtgaaattgtaagaatatgatgtaaaaataacctgaggcacaaatctaaaagaaggcaatatacttaactgttgctatagtcttttaaaataaagattgctaaatgaggtaagtttgggccgggtgctgtggctcacacctgtaattccagcactttgggaggccaaggcgggcagattgcttgaggtcaggagttcgagaccagcctgaccaacatggtgcaaccccgtctctactaaaaatacaaaaaattagctgggcgtggtggctcatgcctgtagtcctagctactcaggaggctgaggcagcagaaacgcttggacctgggaggtggaggttgcagtaagccgagatcacgccactgcactccagcctgggcaacagagtgagattccatctcgaaaaaaaaaaagataaggttgtgtgctgtgctatacagcaaattgtgtgtaataaacgttcatatgctaatcatagttggcatctacttccttttcaagcttcctgaaaaactgctgttttcacaaggttgtaattggattcagcagtacagttttggtcctgagaagtatacaggctcgaatgtgtttggaaaactacggaaatatgtggaattattgaaaacacaggtaagtgtttgcgggggaaataaaaagactaggaataaaagcacatatcccagatagagccagttttctctgatgtcagggacattgcttcatgttaggaaagtaagaagtgcaagcagaaatgcttctagtaactgatgatttccctccttattcttccttctccttcaagaagtgaatgagagcaacattgttctacacgataattaggccctatagggtcgggggcttctatgggccggcctttaaaccttaccaatcatgtacctttgtttccccagaaaaatgtggtgcaagtccaggcaaggtgctcagaaatgctctcctggaatgcaccccattcataacttggtaatggcacagatgtaataatttgactaagacttcttcctgtctttcaataatgacacagattttggatgattgaaatgaatcctgagcctaccactagcttggttaccttgggaaataacctttctggtccatagttttcttatgtattaaagagaaacatcaatagtgtatatcctgtaccattattgtgaggattcaatgacgtaatacacagagagctttaaactgtgcagaatacacagtgaatgttaaagcacactagcactattctgtggaatatcctttgtgtaacccatccatcctaagcagttttggaaaactgacttgctttgtatttaactagtaggtgatactttttgaaaaaaatattttatctaaactaatttcttattgtaaacattttatggtcagcttaggcttctataacaaaataccataaattgggtggcttaacccataaagattgatttttcacagttctggagattggaagtcagagatcagggtgccagcacagtggggtttttggtgagagccctcttcctgttttatagacagctgtcttcttggtgtgtcttcacatagtggaaggagaactagctagctctttggcctcttcttataagagtagcaggtccattcatgagggctccaccgtcaggacctaatcacgtcccaaaggacacaccctctaataccatcaccctgggattagggtttcaacataggaagttgagggagacatgttcagtccactgcagtatacttttatggttaaaaaaaatcaaacagtgccgaaagatagaaagtgaagagttaaagttccacttttttctattaatctttggtttattttataaatacattaaaagttatggaatggtatatgtcttcacctttatccttctgaatttcacttttacatctgtttttagtggactgaatttaatggcattagagattatcacaagagaggaagtatgtgcaacacccttttttcagatgccattctggaatataaactttatgaagctttaaagttcatcatgctgtatcaagtcactgaagtttatgaacaaatgaagactaaaaaggtcattcccagtctttttagactcctgttttccagggagacatcctctgatcctttgagcttcatgatgaatcacctgaattctgtaggcgacacatgtggactagagcaggtaaccggggaggaagaactgcttgtatttgattaaggatgctgtggcactatttgaacacagaggtgtctggggtgacttttcagtggtgacataagcgattgcacagaggtggttgattgatattatcgcccctcaaatgaggaaaagaagactaataaatgcattattctgtgctggctgctttgtgtctcctcagacctctagccagagagcaccaattctcggggcctttctgacctctcacgctgcttcccagatgccaacaggttctctcacatagacgttcaccaggaaaaagtccaggtggaaaatgagataattttgggaaagcgtttggttacctattgcagataaatagaaattaattgaaactttctaaagccagaaaatgaaaatgcttttatccctctagaaaagagtttcttttttgttttgctttcctagagggcgaacaaaattatctgacatttttaaacaaatggatataaaatgatataaaactgattgaatgatataaaactgattggaaaataatgtagtttttatcatgagtgttcttttattttttcactaatttttttcaagtagctttttcctgtgatttttttttttttttttttttttttttgagacggagtctcgttctgtcgcccaggcgggagtgctgtggcgcgatctccgctcactgcaagctccgccttccgggttcacgccattctcctgcctcagcctcccgagtagctgggactacaggcgcccgccactgcgcccggctaattttttgtatttttagtagagacggggtttcaccgtgttttcgatctcctgacctcgtgatccgcccgcctcggcctcccaaagtgctgggattacaggcgtgagccaccgcgcctggccgtgatttttacatgctagtctacagagttgttcctatgctcgtccccttccttccacacaatgagcatttgttctgaactctgtgcccactcagtggtgtatgggtgggtctgtcaacaagcagattatttcataaactgcagaggaacacttccccccaccgtggcgggaggcaggaatttgcaagtgtgtatctgtgacctgtctttcatctcatccacagattgatatgtttatacttggatactcccttgaagtaaagataaaagtgttcagactgttcaagtttaactccagagactttgaagtctgctacccagaggagcctctcagggactggccggagatctccctgctgaccgagaacgaccgccactaccacattccagtcttttaagtccgctgggggccgaacagcagtgctcaccagtgacggtggtcacagttgcaataaagtctctctctgaaaccaaagctagcatttcagcatggaaggaattaggaccttttcttcaggattacaggtacactggatgcagccatgcatggatggtttttctttatttttcagtgatttcctctgaagcagctgcactgatacatttgggagttggtggcttgactttgtccataaggggcgtggccacttcacatgatggcgggcctttaagagcacaaagaagtttaatatggacaacaacaggaaaaagcaagaagaaaacaagtagggaaaaacagctaacctggagagaaagaatttctttaacctttatgttcttcattaaaaatcttatcttggactgatttgagggatttttagaaacatggccttattttatataagcattaccttcccaggaatctttgttgtatattaatttttgataaccatttgattaactttaaaattaagtatatgtgtgtatatatacatatgtatgtttatatacacacatgtatctgtatagttttatatatacatatatacacatagacatacagagaaccactactttgtaatagtgtacagtttgttttatatctctttactttttttgttactattttatctggccagcttaatagttttatttagattttttaaaattctgtagattaaagcaaatgacagttattgaactatcacaaaactattaaactgtggtacatttaatgtgtatttaatgtgtggaatctcattatggtaggcagaataatgccctatgctccccaaagatgtctgtgtctgaatcctcagagccgtaaagggctaaatgggttaaatgggaaaggagaattaaggttgcaggtggaactgagatgctaatccaatgatgctgaaatagggagatttttctagattctccaggtggacgcagtgtaatcagaatggttcttaaaagtggaagagggaattggaagagtgtcagagtcagaggggaatgtgaaatatggaagaacggttagagagagatgcaccattgctggctttgaagatggaggaaggggccataagccagggagttgcaggcagcctgtagaattgagactggaaaggaaacagaaacttccccatagcctccagaaggaacgcagccctgccaacaccttgattttagcccagtgaagcctgtgttggacctctaatctgcagaactgtaagataatagatttgtgtttaagccactaagtttgtggtaatgtgttgtagcaacagaaaactagtattctcaggctagtttttggtcgtctttattttggaaatacttttctagtttaatttgatagttttttttttggaggtactttgctagtctgttttgagtttcagtacataagaataatttttaaaatcttgctaattatatattacttcaaagtcacaaatccctttctaagaatgacttacttcacgagatatttagcactatcattttcccagatgttcatattatttctgcaataaattaaaagggagtgtgtcaaatgctgtcatgtctgaaattagcattcatattcttttgcaatggggatgatcagtcgtgtgtactacatgaaccatgtctgatggtagcttgttcccactgtcattttgttttctggttgaagattaatgagctcagccacagaaacaagagttcttcattgacctctacagtccctgcctgtttggaaacatctatggttttgtataacccctgtcatttaactgacagtgttagaagatatccccctgatgtgttactgtaaccaagaaagcatgaacgttaccctttctggtgacagcctgccatgggctgctgtggctgatacttatagaattgttgctccaaaattttggctccacttgagctgtccagaagtgtacctgacatttgtgtattaccactcaccttggatctccttactagtgtaattatttccacatcaatccaggactgaaaggaaaaattttttcaccaggattggcagcctgtagctctgtgacctcagtcaacccatcatgttgtgttgtgggcggggggcaagaattctttagagaaccaagttgcgagaaagatttcaatccagtgaaagtaaaaagtaagaagacatttagatagttgctatattttgggaagatgtcaaaacaggtttttagggaggaggtatgaggtgttgtgttgttttgtttgtttttattcagttgtataatgaatataacaaattaagtagccagaaggagctgcatgtaaattagcaccacttttaaatgtcaacaataaatttgaggtgagcttcctgggtgatgccaacatttaaatgtctttctaaccgtatatgttttaaatggtgagagaactatagcaaaaatggaaacataatgccctcgtcgttttttgattttaggataagtttctctctcaaattttggccttacgtgtccatactgaggggttgtatgcatattagtacaaggctgacttttactgtggtaaaatacacataacatatagtttatattttaacaatttttttttttgagacggagtttcactctttttgctcaggctgcagtgcagtggcacaatctcggctcactgcaacctctacctcccaggttcaagcgattctcctgcctcagcctcccgagtagccgggattacaggtgcccaccactacgctcgactaattttttgtgtttttagtagaaacggggtttcaccatttagccaggctgatctgaactcctgaccttgggcgatccgcctacctcggcatcccaaagtgctgggattacgggtgtgagccactgcgcccggccctaacaatttttaagtgacagtgacattaagcatattcacattgttgtgcaaccctcaccaccatccaccctcagaactttttaaaatctccaagactgactttttttcaaagcaggcaactttaattccctacctggtatctggattccttttccttttcatgctatcttttcatcatacctcttctaatctgagtatttcctctgggcttaaaagagcctcagtggagaagtacaacctaagagggagttaggtacaacctaggagggagtcaggaggagagagttaggttagttagtacaacctaagagggagttaaatggatcaggaaaatcgtgttttatctccaaagtaaaatgataactatgggtggcttctgggctcaatttagaatattatcattgaaaagtccccaagaaactattaattcagagccaccctggtgagttgaatttcttgaatgtcttcatggtcttgaaccaaagtcatttccacccaagggagagtcaggtgaaagtccccagggccctctctaggggaccggagacctccagactaagctggtggaggatgggctcaacctccatgagagaagagcagccaggatcagggggcattaacgttaattttcccaggacttttctgcaaatgggtattggatggaaatatttgttctcagtcagatgagtttctcctattttagtgagaccaaagaaagacaattttaattgtgtccaagctgacttttttgaatgctctggaaatgttggaattccacatcaaagtacgtaactgttttaaactgataactaacccaatatgtgaaaatatatgcaagcatgaataaagggttgactaattccagaattagcaataattttctcttaaatagcaaatttctaaagctgtatgattctctttgcaagaatgtttttcacactgcttaataagaccagttaatgtgtaaaacagaaaaaagtatatatatatcatatgtcttttcatgcatctgaaactttaactgtctatagggttgcttgtcatagttgaacattatttaattaacttattgactatatatgggtatacttttctctatagccattcacttttttaaagttttaattatttaattgacaaattagctattcattttccttcaaatcctgtttttatcacaatgtccattttacagctagacacaaaatttagtgggtccaaattgttcaatcacttctatgttatttgttcagaatagtggatctttgcttaattcacttctgttttaatcccatcatattcctttaggccaagaaaaggaaagctgatttggattatatttatgcttaatatcaacatggtttataagtggacagaaaaacactcactcacgtattcagccacgtatggtctggagtgctctgtagaacagcccgaagtgtacaccatgtctctgcacttgaagctcatggaatgtgttggaggagactcaagctccatgtgggaacagtgtggcccaagagccagcatggaggagggctgtgtgagcagactgctatagaatgctaaagttataatcctagctggtgtctcgttctgtttaaaaaaatcaaatttctgtatgtaattgacgtattggtccttatagtcagtaccatcaggtcttagattgttaagtcattttgctgccaccagaccagtgagagtcactcacttatttgtaatgattcttgggaagttta

SEQ ID NO: 552 - DNA, 26170 bp, Homo sapiens
ttttctcctattaatctgctttgtcatttgattttcaatgaaccttcagagggcaaaaggaaagttttccctcagctccaacagttttggcccagtgaacaggacaaccaaaactgctctgctcttccgaaaattgcagtcagggaacctgggacccggcaagccagcagaagggtaagaaattctttccagtcagaatcttggtctgtgtttgtctttggaatctggatgagcggatagtaaaaaaaccatgtttgtctctctttccatatgtaacattaacaggagaaaatcatttttgactggtcttgggtgtagcaactctggtgtattttattgtatagatattcatattgtcttatcttttttctcccagaaatagattttgtttctccattgtctttgtctttatgtgttgttttgtcataaagatgggtgtcataggatagaacatgggtctaaagtctctataagccccttgtctgagctggcccccgagagactggtgatgtttacagtttcatcagacctatgtacaattgtacgtgctgtgagtccccgaaataaaaactggatgagggtccccttatatcttgttttgtgtttgtgagaacttgacttgtttgttactggtgggagcactcgctcttgtttttcaccatctggggagtatgattttcgggacataactggtggccagtctgaaagggccagaaccctagacacctaagatattaagcagcacactcttaggtctgaatatgccagactctcaggggactttgtcctatctataaaggacctttgttgtctcaacacatgctacctggttagttctggaaaagtccaaacccaggagggtctgctggtgcaacagattaaggggtctgtgactggcacaccccacaactttgtgggatagtgtggcactgctgcacacacagacagcaccctgcgccatctgtggtaatgagtcttttgctaccttagcctatttctgagagtgaatttttgaggaatcatgagggctacatcaactgaaccgatttttaaaatgccacttaacattcatagtattgtaaacttggaaagttacctctgggactttgcatgaaaaaagctgattggcttcagttgctttgcaataaagaaactggctatatttaagtgaaaactttttagagggctcttgccttaatcagctgttattggtacttatataagaaacaaaagaaatgtagccttagaaactcctttggcaagatttcaaaaaggcagaaagcagattgtaaatgtacttaaaatctttttgcttcaaactgcctgctttggggttcccgctgaacctacaaaaagataccccagcttgtagtgtaggggctaggattctactcttcactgctgtgatctgggattggattctcattcaggaaatcagacccttagagatctagatctttgcaactcaggagaaaaagaaaaatgtacaacaattagcttgaattatttgttttgaatttatgtttgtgtgactctcgactgtttggagagttacattaccatttgatattgatctttttcccttttatggaccatttttacttttctgttattgaagtctctttaggggctggctccagatcttgtgaggacttcctcttcatgccactttgaggtgcctcatatctgtcctttgttacctcataaaggatttactggctttggttctgagtcactcagtagatacctttggttagaaaggagaaataaaagttcaaaaacaaggaatactggttttttgtcccagctgaaatctgataataataaattccaatttttaaaaaaagaactctaaggtcagaaaacagcttaactaaaagctgatattcaggctataatttttactttatttttttaatttattattattattattattttgagacaaagtctcactctgtatcccaggctggagtgcagtagcatgatctcggctcactgcaacctctgcctcccaggttcaagtgattctcctgcctcagcttcccgagtagctgagattacaggcacccaccaccatgtcaagctaatttttgtagttttagtagagataaggttttgccatgttggccaggccggtctcaaactcctgacccaggtgatccacccacctcagccttccaaagtgctgggattacaggcgtgagccaccttgcccggccgtactttgttttatttttcacaaagacttttcccttttggatcttctttctaccctgtgttggtttttgttttgttttgttttgggcttttttgtttttccagtcaactgaagctctttttaaaaattatacatttggtccttttttttgcttcctttcttattagaattatttttactgagaaaaaaaagtaaaatttcattggtctttttggaaaagcttaaaatattcccgatgggcttctctaagagttgttttcccatttacttctacttcacctttcttttgccacctttaatattacattaaggggtctaaccaggactttgactctcatgaggggaccctgtgaccctttgaagaacacacaaaaaaagtgccactggcctcttggggcggggggatgttccctgtctccattacagagctccaagaggtatgggcaggttcctctcaggtctaaagatttgccctctgttgtgttaagccccctgatgtctggcttttggatacatatctgtgtgttctgtattttatgtctacacatatttatatttctatacatatgcttgtatattgtctaatggtaataaattgacttgaaaataaaaacacatataaattaagtaaataggttcaatgcttttcaaattcatatgaccttaagaatctttgctaaataaaacttttaaaattattggtaaaataaaataaaaatttcttcagaatttaatttatacatttttgcctggggctactgctcaggcaggtttggactgtctctgctaaatgtagtaaggtcataaaactatctcttctatgatatttttggtacttctttgatttgtctgtgagctaaagctactacagctggtggctgggctcccccaatgccttgcacacatcttactgtgagcctatgtttttgcttttgagtttctaggtcttggagcctagaaagattgccatgatgaagcctgaagatatatgtgtgtccacagcacctgggctaccagctgcagggcagagtcaagctcagtagggccctatcctcccacatccagctcttcctcttggtcatgctgggaggggtcagatcctccagacatcatcttcatagttctgtcctctgtcccgggctttacacttggtgtgtaaatccaggacccaggtggaccctccttttcataaccatcgtgggtgcccatgggcatttggatccaggacaacctggaggatagagtattggggaggatacctgtgcccagtatcttaaaggccttgctcaagatgaaattggctgatttagggttgacatggtttagctgggaaaaaaacaaaaaacaaaaaaacaggccaggcacaatggctcacgcctgtaatcccagcaccttgagaggccaaggcgggtggatcacaaggtcaggagttcgagaccagcctggccaatatggtgaaaccccatctcaactaaaaatacaaaaattagctgggcacggtggcgggtgcctgtagtctcagctactcgggaggctgaggcaggagaatggcgtgaacccgggaggcagagcttgcagtgagccaagactgcgccactgcactccagcctgggcgacagcgcaagactgcataaaaacaacaacagcaacaaaaaaaacccaaacaaacaaaaagcttaagcttaaatggctactattgtttttcatgaggaattcagacataattgttgatgagtcaattaggtaaatacaaatagagtaaatgtttacaaataaatttatcatagtttcaaaaatctttttggtaattgacactcttaaagtcttaaagtcatgttatattaaattaagtaatagttaatagtgaaatatctgagttatttctaagttaaaatactgacacatcaattattaagcataagtttaagtttgaatactctgataccttattttgatgtgatatagaaaagataaatatatttgaatctcttgataaacatgaaaaattgaggaaatatttttaagaattataaaatggttttcatttacaaatactgatatgaaagagttcccttagattttcactaaaaattaagatactaagagttaaattataattaatatatgtaattaaaaccactaaaaataaggtaaacaattttgtatgcaaagtgtatacaaaaaaaggcaagatacgtttttggtgagaacgcttataaggaagtcatgagtatgtggtttggttaaaggaaaagtaattttgtctagtttagaggttacttaaaagttgtttcagaccaggcacagtggctcatatctgtaatcccaacacttcgggaggccaaagtgggaggatttcttgaggccagcttgggcaacagagggagaccctgtctctacaaaaaaaaaaaaaaaaattttaattagctaggtgtggtggtgcacacctgtggtctcagctactgtggaggctgagggctgagatgggaggatcacttgagccggggaggtcaaggctgctgtgagccatgatcaggccattgcactccagcctgagtgacaagaccctgtctctaaaaaataaaaataaataaaaaataaataaagattgcttcagactaagtgaatggagaaaaaaaatgatataggtaaaactaaatggatataaagacttttaaaaagtagaagagtaggaaaaaattataataggttatagaaggtttatgaaaagtttatcttgtgtgcaaagctgactgatatcagagaaatttgtttacacgtcattaaaattagctttagtatttaaagtacacaaagacaaagctagtggttgattttctcttttaaataatatttttgcataggattaataaaaagaaaagatttttgtacatgttctgagtaaaatgcaaaaaaacaaaaaaaaagcaagagagagaaacagattttgtgtgcctcatgtcttgtcatgcttcttcagaaggtgttttgattatttgcaaaaccgagtctcttatcaatcaaacagcaaaggtttttgctttttgaaatcttctaattatcactttggctaaatgaatgactattattttttcattggacctatgatcctattttgatcaagtatttgaaacctttaatgtatttgagaggcttctcacaattatatttcaaaatctaaaattaagtatttttgacctcaaactaactttgagatattccaaaaagctgctgaagcttccaaaagaaataataaacaggcttatttgatatgttcattatgtaaaaagattttcaaataagaaataatatttaaggccgggcgcggtggctcacgcctgtaatcccagaactttgggaggccgaggcgggcggatcacgaggtcaggagatcgagaccatcccggctaaaacggtgaaaccccgtctctactaaaaatacaaaaaattagccgggtgtagtggcgcgcgcctgtagtcccagctacttgggaggctgaggcaggagaatggcgtgaacccgggaggcggagcttgcagtgagccgagatcccgccactgcactccagccagggcgacagagcgagactccgtctcaaaaaaaaaaaaaaaaaaaaaaaaaaaaaaaaaaaaagaaataatatttaaccttttcaaaattatatttgtattgtcatgttattagtatttgctccaaaattatatgagattcctaaaaattggatttgttttgttatatgttattagtcataattatgagtattatgttaaattgttgtaggtcataaaaggagaaaatgacctagttttcttgttaattccatctttaaccacggccatttttagtcttgctcacaattaatttttttatgctgatcctttttttctgaaagctctttgcaaatcctaaagtgttgtgtcttcaagaaagctcatggaaaggactgcaacaagtactcttggctgggcacagtggctcatgcctgtaatcccaacactttgggaggcagaggtgggtggatcacctgaggtcaggtgttcgagaccagcctgaccaacatagtgaaaccctgtctctgctaaaataaaaaaattaggccagcatggtggcaggtgcctgtaatctcagctactcaggaggctgaggcaggagaatcacttgaacccaggaggtggaggttgcagtgagccgagatcatgccattgcactccagcctggccaagagcaaaattccatctcaaaaacaaacaaacaaacaaacaaaaacaaaaaacaaacaaaacaaaaaacaagtactcttgaatacaagtttcttataattttaagattgtattatagcactgagtaaacaatttcagaactctaatttttaaaaagtcataaaattgttaactcaacatcaagcaaaacaactaattacattggactaatgtaattttaataacttttttgtttaaaatattgctgattctttttatgttttgctttacagagttaaggaaaatgtttgttctgttaagctttacagaaatgggtaaagtatacttttttgaacaaaattgaaacattcacttttctctctacctgattgatcctgaatttggaaactatgagtatttctattttatggcaaaatagttatttgaatcagttcattaagaatctgttcccttttgccacagaacacagttggagactctggttattttaccaaggctttgactgaaatgccatattttcagatgtgaccagacagctttaagaaactgaggttgatattatgaagcccataggagcttttggaaaaactggtctaatatcctaaatacacggttcacataatgggcttgtggtaagtaagaatgtcactttctgacatcccaggaacctcaagttaattgggggaccttgagaaaagagaaattcactaatttgtacaggtattactgacacaatctaagagcaaatccaatccttgacttggctttctagcctgaagaggtttctaaaagtttaatctgagattccttacgaaaagttccagcaaagtgaacttaaaaggagcctgtgttacaaattgatattcttactgcactttatgcaaataatcaggccaagtacaataagacgaaaacttaatatgcaaataaaatggctttgcttttatttatctttggtagaaatgggggactgaagagagaaaaatcatgtttcaggaaagaaaaaaaaactataattagattccagttcattgtttgttttttctttctttctcagatttttttatttgcctgtaatctaaactaaatcttaaattgttagtcctatcaaaatctgtctttgaatctccaggcaagcattttcaattttcctcctacatttctgacttggaatcactaaacgttaaaattccctttttcctaagactctacaagctgatactagctaacttggctttgaagaaaaatcactgcaacattttataaatggacaaactttgcacacaagctacaatccaggaaaatctgtcagattgctactgatattctcagctgtcctgcagactttagaagaaactagtttgtaaactactccaaagattaacctttgtttttcttccaattctgtaaaaaatggctcttactgtagatctttttgtctgcattatatatagagtcatagctttaagatcccatctacaaagccatctcctgatataagacaaaactggccttttcccagaagtgagaagactaattagactggccttttcccagaagtgagaagactggtttaatgagatcctttgccattcagctactaactcagtttttctctctacaactaccaactcaactttttgtgtatgaaacattagaaaagtttcaaacaggggaattactggggctcagaaaaggacacccaaaaatatggcactctgatatgctggttacttcaaattaaaggctcccggaagccagtagacactggaagaagttgttccccgaagttctcttacctgccttaagtccagatctgccaaagaagaaaacaattacctctggtcccttttctgtgttttcattaacttaactcatgttacaggaagaatgactaaagtttgtcaacacacctggacagacttttgtcacacatcattgtcttctatttcagtccaattcagtattttattttacttatttattttattttattttattttattttattttattttattttattttattttattttatttatttttgagacggagtcgccttctgtcgcacaggctggagtgcagtggcacaatctcggctcactgcaacctccacctccctggttcaagcgattctcctgcctcagcctcccgagtagctgtgattacaggcacataccaccatgcccagctaatttttttgttatttttagtagagacggggtttcaccttggccacactggtctcgagctcctgacctcaggcagtccacccgcctcagcctcccaaaatgctgggattacaggcgtgagccaccgcggctggcgcctggttattttttagtgatttttagacatctataaaaacaatatcagtactttgaggtctaagatgatgttttcttccttaagggagtatttaattttgttttattttggcaactaagggccttaattagcaaaatctgaatcacgttaattccctttcagagatatcatgaaagtttcctcataagccaattataaaagtaaaattagttactacaagcaaagtttttagaaaattcctgactctagtaagtgcccagaaaaatttgaatgtaattgatttgcatgaaaaatgctgtaaaacataataacataaacgttaatggtgaattcagtgatgttggtatttccatgacttttttcattctccttacatgctgtaaattattttttaaatgaaaattcttttattaaaaaaagctacattttataaattagtataacataatggtaaagagaaatgtgaatgtattagaaaagatgctccattgagaggagacacatttgtatttatcatgaccttgaatgaaggtccctctgcagatcctatcataatagtccttgtgtcagtgaagtcccctgtgaaactggataacaggattttaaggtagagatgttcctcaggcagatggaaatgtagtctatagctgtgaagataagtcaggcaatgaaataattatagagaaaaaataatgtaagctatcaaagacagatgtatacaagggagacagagtcacataaagtctcagatgtaggaggccatagagcaaaacgctgagttctggctttcaggagttttctaacataacaacctgatcaccagttaaaagctaaggagaaagatgaagaatcagtatgagatcataaaattatgatgctcttctaaaaatatgcgaaatgaggtttttagggaggtgtaggtatggctgaagaaaatcaaggtgaatgaagacaagatcaattgagaatgtagtttcagaaatagcaaagaagccaaagtttgaggaagttaagtggctagggataacattgaggcactaaagcattattggttctgcagtcaagggtaggatagattgttttttttttttttgagacggagtctcactctgctgcccaggctggagtgcaatggtgcaatcttggctcactgcaacctctgcctctcgggctcaagcaattctcctgcctcagcctcccgagtagctgggattacaggcacatgccaccatgcccagctaatttttgtattttcaatagagactgggtttcaccatgttgcccaggctggtcttcaactcctgacctcaagtgatccgccctcctcagcttcccaaagtgctgggattacaggcgtgagccaccacaccggggggtaggatagatttagtgagatgactggataaacggaatcaagaaaaagctttgtcaaaaacttatgcttcttaaaaacttaatcctgggacagaatcatctaaaacgttgttccatgtcttcactttgactcacccataaaaacttcaagtacaaagaatgaaaaataaccacatattttctaatgctcaatattttatttgtagtgttgttttctatatagatatgataggtcttcatgattttttgtttgttttccttgaactgattcccaaagtattagcctcatgaatcatgtagtcataagaaacacagtcattgtattctctttgctgtataattttggtttcagttttccttacatttcctattcaaggaacattttcctgtaaaatgacaggttgaagaaaacagccataatttagtagagaatagcgcgagagctattctagactgtaacgaaagccatatgctatcacaatttaatttatttcaagtactaataagctgatgacaaaacagcgatgtcttttagtttactcacacgaactatttctcttttctccttttgatcatctagaggaacgggcaacttggtttcttctttagcttccttgttctcattaagattgaacaatgcctctaaagtgaaccacagacttgcatgcaagctgaaaacctttaccaaatgcagtcttaatttgtactttgagaaaaacattttcaaggtattttatccttttctccaacttttgacatattacaaagtacccaaatatgccagactgttgcctcatcagccccccgcagtcaggtacagttagatgcaaggcaatcttcctaaaagttacttattagagatgtgagaagggcaaatgctatcattggaaaaactgacaaaagtcccaataggaaaaataaggaagtggagagttactatgtttctaatttttcatgtgcttctatttttttcctacttcagagccattgactaatagttgagtataacacaggttgtgtttccgggctgctgaaacatgacactaatattttcaaagaactgtggaagcctaaaaggaagccaatgagaaataactaaatgagagtttaggactgcagccttcattttcattcaaagatttaaaagtttccataaagtaaaatgttcttctccggccacctgttttcatagttctgtgttttccttcaggcctttctggcttcctatatggcagtaagaaaatgatgtgcttaatgattacaaatttcatatggaatacgaactttcagtttgtacatatgatgcacagagatgcttttgtggttttattggttttcatattacaaacaaagaaactagaaaatgaaaccattccaaaagtggaagtaatttctcactgcccctgtgataaactgtggtcactggctgtggcagcaactattataagatgctctgaaaactcttcagacactgaggggcaccagaggagcagactacaagaatggcacacgctatggaaaactcctggacaatcagtaaagagtaccatattgatgaagaagtgggctttgctctgccaaatccacaggtaagagaaggcagtaaaatgtgggaaaatgcattcttcttctcattccttacctggccaagttaacttctactgaacaactgtggttcagtaacttctagtaaacaaacacataaagctgtgtaaaaattagagagctgtaataactgcatctcacttaatttgtcttacattttctccctagaaatggagtcatctatgcatttcttacttacctaacatggatacggagagtggtgagaaaggaaactatagaaagtgtatcagctttacataagaattatatagtaaaatacaaacaatgaggttattacagttgtattttgagaaaaggtgttttgcaaaagccagagttttaaatgagccatgagtcaaacagaaatccctttctcttagggatataacttaaattatgcaaaacatgtgtttctaatttgatggggtttatgagattgcacatcaagcaccttccatgttatattatcattgcttgttatttactgagcgtaagattcaagtgagagtctgaactaccttttttcttgtttgcaagtcttacctataaagtacaaggtatgtggaaaaaaggtttgccttaaaaactacattttctagtctgtcttctaacgaatgctatgtaaaccaatttatcatcaatattttaattatcaaatacagcatttttctaagcaatttacaaattaaccctttccattctcatagccatcccaaaagttatgtatgttatttatttattattattattattattttgagatggagtctcgctctgtcacctgggctggagtgcagtggcacgatctcagctcactgcaacctctgcctcctaggttcaagcgattctcctgcctcagcctcccaagtagctgggattataggcacctgccaccacacccagctacttttttgtatttttagtagagacggggtttcaccatgttggccaggctggtctcgaactcctgacctcaggtgatccaccgatcttggcctcccaaagtgctaggattacaggcgtgagccactgcacccggccagaaacgtatgttattatcctcatgttcctaatgagaagtataaggcatgcagaatgtaattatcaaactatgtagctagcaagtgccagaggccagtatgagcctaagcagcctgtctccagagtctatgatcttaaaaccattattccacactgcctctcttaagaagggataataagacattgcttattttctttctttcaatcttcagtttaacaaggtacatgggattccaggagaagatttctatgaacatgttataataattctgtagacgagtgtatttttgtttgtagctcaaacagttacagtccacatactagagagcacctttaaacacagcaaatgtttagtcagagatttcaacctaactgtgcttagaaatgaaatcctgtaaacaatttggtgatactggcaaatttaaagcatctacctccttccaatctaattttcctcttcagattgttaattaaagaaaatgaaaagtatactttaattttattgccaaaagcactagtttgctttattcatgcaaaacaataatactcaaacttgctatttgcccgcagatctacaaaaatgctgggactggatgatttcaaggatgtacttatcaatggtacaataaaaccatctttttcagaaactactaaactttgtatcatgggttttgtttctcagatattcgattctccttaaaaatgcaacaactgtgataattatgaatacctgtagaacagattccaaggagtaaagcaaaaccccaaaagaaaacaaacgaaactcttccttagctacttaaaaaaaagattctcggctggggacgggtggctcacgcctgtaatcccagcactttgggagacggaggcgggtggatcatgaggtcaggagttcgagaccagcctggccaatgtggtgaaaccccgtctctactaaaaaaatacaaaaattcgcagggcatagtggcatacacctgtaatcctcgctactcaggaggctgaggcaggagaatcgcttgaacctgggagtcggaggttgcagtgagctgagatcacgccaccgcactccagcctgggtgacagagcgagactccatctcaggaaataataataataatagtaattctgacaaggtgcagtggcttacacctgtaatcccagcactttgggaggctaaggtgggtggatcacttgaggtcaggagtttgagaccagcctggccaacatggtgaaacccctgactctactaaaaatgcaaaaaaaaattacccagcatgttggtgtgcccgtagtcccagctacttgagaggctaagacaggagaattgtttgaacctgggaggcggaggttacagtgaactgagattgcgccactgcactccagcctgggtgacagagtgaggccctgtctgaaaacaataacaataataacaattctgctagctgagatgctgcagaagctagattcactgtcccggaaacatgaaaaaaaattattggttacttttatttcttcactgaagatctttcctagaaattatgaaccaaaaaatgtctgttttatctctcataatctatctgcttcttagtccaaaggaaaataatatgttttctgattccatatagatagatacaaggcacaatctctaatctagcagaatttgaatgatcctcagtatgattcatttttaatttatattataccatttagggatcctctgaaccagagcatattactgattaaattttatacttgttgaaagtgctgtcaaataaaatgatcatcattgtgcagaacaaaaaagtattctgttatttggagaaaatcacaacaaccaaaaaaataagatgtactagatggtgaaacatagaataaaaacaacaaaaatacatttattacatttcttttgaaagttggaaacttcacaataaactcgatatacaaaaatcgttatgtaaactgtataagcctgggtttccttatttatgatacagagataacttcttgggccattacaataattaaatatgtatcttttatatatatgaaattatcgagcagagtgcctagtccactattgacatttaaaacatctcattttccttccattcaaagaacttaaaatctagccaagataaaccaaagtaggccaggcgcagtggctcatgcctgtaatcccagcactttgggaggccgaggcaggcagatcacctgaggttaggaggtcgagaccaacttggccaacatggcaaaaccccatctctactaaaaatacaaaaattagccaggcatggtggctcatgcctgtaatcccagctacttgggaggctgaggcaggagaattgcttgaacccaggagacagaagttgtagtgagccaagattgcgccactgcactccagcctgggcaacagagtgagactccaattcaaaaaagaaaagaaaagaaaaaccaaagcagcagataataattgtttaacaatttgaaaaggcataatccatagaatttatagtggaggagattggtttcaaatagagtagtcaggaggattttagtgaaacctttgaggtgaactttgaaaagctgcaaatggcagtgtttgaagagagaggaagaggtggaacacagagagggtcttcagccctgcgtgtgcagatgacaagacagaggctggtgtttccagacaggtaagccatatgccagggcaacattgcacagaatggatgtgaaggcaaggcatactatcagtgggaagccaaatctacaataactgctactactaaataaagatcttttttttttttcaaggaaaatctacctgatttttataatgactggatgttcattgctaaacatctgcctgatctcatagagtctggccagcttcgagaaagagttgagaaggtttgacatatgtattacatttgtcttcttgtatagcttcttaacattgttaacttggttttgaagcataaaacattactgagattgatttgagtcaattgctccatttgttttcagttaaacatgctcagcattgatcatctcacagaccacaagtcacagcgccttgcacgtctagttctgggatgcatcaccatggcatatgtgtggggcaaaggtcatggagatgtccgtaaggtttggagattttctcagatttcttatgctatgtgacagattttcatctaatttacatttaactttccaaaaattttctaaaagcattataactgcatcatgcaaagtttagataacacgacaaaatgataaagaaaatatgccctggcttgacatgtccactgttatcattattatatttttagtcttttacttcatttttcatcctgtattttatctggcaaccctaattacataaaactaatacagactgcaatatctaacctttaaaacacacatgggcctcccagcactttgagaggccaaggccggaggatcacctgaggtcaggagttcaagaccaacttggctaacatagtgaaaccccatctctactaaaaatacaaaaaatagccaggcatggtggcaggtgcctataatcccagctactcgggaggctgaggtgggagaatcacttgaacctgggaggcagaggttgcagtgagccgagatcctgccactgcgctccagcctgggggacaggagcaagactccatctcaaaaaaaaaaaaaaaaaaaaaaacaacaacaacaacaacaaaaaacctaactactgtattttaatcaggtcttgccaagaaatattgctgttccttactgccaactctccaagaaactggaactgcctcctattttggtttatgcagactgtgtcttggcaaactggaagaaaaaggatcctaataagtatgtaaacagtgataacaacaggaatttttggagtgtgtgccgattaaataaaacaggggttgttcattggcttaattttgggcagcgcagctttcctctcagctgggtatggttcctctcagttcctcggctgggtacggtttcttggactgctgtgtctaccactacaaatgtacacatatgtgacaggtgtatagttaacacagtaaaatgcacaaatcttaagtgttcagcttgaatttaactattatatacatacatacacccaccattctcagtaagatacagaattttttatcacctcagaaaatttctttgtgcctctttcaattccctttcctgccacagacaaatatatttttatttgccttatcaaaaattagatgatttttgttattgggtttcatatcaatgaaaccacagagtatagactcttgtgtctggcttcttttgatgagcatgtctttgagattctattaatttaattttttagcagccaattgtggttaagagtcaacacatctttaattacaggcagcaatgactggtttctcagagcagtctgctcaggatataggtgatttttacccatttaggcataagatctgctacaataaaggaaagggagaaccaaagcccacgtctctgggtgtgtgcctgtagaaaaatattctgcaaatgggaatatcataaaatgaaaggattcaatctagaaagtttcttcttattaaaaattagtttttttaaaaaaaaattcaccgggaatggtggcgtatgtctgtggtcccagctacacagggagttaaggcaggaggatcacttcagcccaagaagttgaggctgcagtgagccatgttcgtgccactgcacaccagcctgggtgacagaatgagaccctgtctcaaaaaaataaaaataaaacaactagttttgactgtccatgtgtgttccttgcatatttaattatttcattcatttgtaagttattaagttaaatgtaatgcctactgaagaaacattttaataagctttttctttttacctatgtcttacctctgatagtagcattcaatcaaatagcaacaactcatcattatttgatgttaaattggttttctttctctcttccaattggtccattgcttcatggctgctttcataaggcccctgacttatgagtaagtatctgattcttgtttgattctaagaattatttgttacttatagttgaatgtaggtttatcaatagactccaaatgcatttttaaatgattaattgaattcagccaaaaaataatttaagtgactatttagagaacaaataatctcagtctttaattgtatctatgattgtgttacaactatgtctatctgatattatagctatagatatatacaagaatactactcaaatacatctgtaggaaattaatatgcaaacatacaaaatgcacatacatctgtgtatctatgatttaataactcccatgtccataactagttaccggtgtcaataagtaaccatataccaacttgttctttttgacccaatccttactacttttgacctataatatatactaaacataggctaagagatggaaaacctgggctgggtgcatggctcacgcctgtaatccctgcactttgggatgccgaggcaggtggatcacctgaggtcaggagttcaagaccagcctgggcaacatggtgaaacctcgtctctactaaaaatacaaaaaattagccgggcctggtggcgggcgcctgtaatctcagctactcaggaggctgaggcaggagaatcaattgaacccaggaggtggaggttgcagtgagcggaaatcacgccactgcattccagcctgggtgacagaacaagactccatctcaaaaaaaaaaaaaagatggaaaaactaaggtaaatatcatcagtataaacccaccttggtgaagctagactaatgaagaggaaaggcagtatatgaaaattatgtaaattgcgatatgataaagataaggcataagaagttaaagtattgggatccctaaccaaataaaaggagtgatgggggaacccttgaagcaagttatttgaggaattagctagaggaaaaaggtaagagtattcatagcggaagaaacagcaaaagtgagaccttgaagtgacaaacatcttggtgcgttatcaaagctgaaggatggctaatgtcactgataataagtgataaaaataacagtgtgagaaaaagattaatttttttttttaaagatcgctgggaaaagtgggtgaatcacctgaggtcaggcattcgagaccagcctggccaacatagtgaaaaccctcctcttctgaaaatgcaaaaattagcggggcatggtggcacatgcctgtaatctcagctactcgggagactgaagcaggagaatagcttgaacccaggaggcagatgtggcagtgagacgagattgtgccattgcactccagcctgggcgacagagtaagaccccatctcaaaaaattaaaataaaaataaataaagattatgtaggattttattagctatgataaggagttaaaacagtatcttaagggagaaactggaaggtttttaaaaacgaggatgacatcagcagtcagtctcactttacagatgagaacaccaaggcagacggtgtcatatcttgctcaaggtcacacagcaagtaagttgcagagatggtctggcttcagataccatgaatttaaccaccacaaaactcatagatatacagatagtaagactatgtttgcaccaacgcccaaacttcaattaaaaagaaaaacagggtctaatcagttatttgaatttcgcagtcaattcctttgtaaagcatataaaccactgagaaattgaattaggctcacaaattaaaatgtgaatatgaatataattatttaaacaaaagactacctcttaaaactctacctcgcagatatcctgtgagaagttgacgggataatagaaacagaactagtttgggaatttctaattctgagtgttttttgttgttgttgttttgttttgtttatttgttttctgagacgagtctcgctcttgtcgcccaggctggagtgcaatggagtgatcttggctcactgcaacctccgcctcctgtgttcaagtgattctcctgcctcagcctcccgagtagctgggattacaggcgcccatcaccatgcccacctaatttttgtattcttagtagagacggggtttcaccacattggccaggctggtctcaaactcctgacctcaggtgatccacccgccttggcctcctaaagtgccggaattacagatacagatgtgaactaccatgcccggccctagttctgagttctaatatgaaactttaggtctcagtttaacctacttactattaattatatgatcttggacaatgggcctaaaaaaggagtcttaatattcccaactacataatggagatagtaaggcctgccacacctctctcataaaattatgttgaaactaaaatagcataaataaaaatgtcaaaaaatatcccataatttttgctaaacttcttgccttccttatccaatttcctcaggaacatggacgttttgttctcatttcgtgatggagactgcagtaaaggattcttcctggtctctctattggtggaaatagcagctgcttctgcaatcaaagtacgtctatcctcacttcaaaatttatatgtcaatttacgtaagcagagcaatcacttcggagcctaaactatactaagcatgagttaactttatccttaacaagtacaacatgggatcatttaattgggggtaaaggatcaattatttatttttgtgtattacctaaaatataaaatctcagagccatatacttaaaatccaacttgaaacctctgtaggagataaaaattttcaataaaatctggctttggaactatgatacagtgtcataaattcaatagttttgattatcaaaaatagaaatgaaacatatacaactatataaatatctttaaattaaatgctatgtgaataaaaacaaatccaagcttctataaatgtaaggaaattagtcaaatagagtgtccagcccaggaaagaaatgtaaaaatcccaaatttaatttatggattaagacgggggaatttggcagggcacagtggctcacacctgtaatcccagcactttgggaggctgaagtgggcggatcacttgaagtcaggagttcgagaccagcctggccaacatggcgaaaccccgtctctactaaaaatataaaaattagccgggcatggtggtgggcacctgtagtcccagctactcaggaggctgaggcaggagaatggcgtgaacccgggaggcagagcttgcagtgagctgagatcgcgccactgcaccccagcctggacaactgagcgagactccgtctcaaaaaaaaaaaaaaaaaagaaagaaagaaaaccttaaatgtttgtgttttgtttgtttgttttaggtaattcctactgtattcaaggcaatgcaaatgcaagaacgggacactttgctaaaggcgctgttggaaatagcttcttgcttggagaaagcccttcaagtgtttcaccaaatccacggcaagtgttgtgtgcagtgcaatagtctaggctgacaagtcaaatgttccaggtgtagaatagttgaaaaaagggaagcaaaaagcaactatcacttagtatgttttcactttaggtattttatcttactaaaccattccactttctatgtggtaggtttcattatctccattttataagtaaagtcatctaaattcagaaagacagggtaaatgacttcagattccacaggcggtgaagccagagttccaagctgggtctatttaacactaaggaacttccttgcctcccgctaaaaaccttagagaaactttccacatgggagggtggttttaagtcccgaaaaaaaaaaaatagcttctgcttgataagaactccttcctaattctgtttttttacaaattaagaaacaatacagaaaagtcattgaggtcaaaagttgttgcaaaattaacagctaaaaaactacccacaaaaaaacacacaaaaaagtgcataagcagtaatttgcaataggaaatctgccctactgaacagactcaacaaatacttgattgtttctctctgggttttgagttattgctgtttagtccttggcaagaagctagattttcaaatcaagtagggtaggagactgagtgcggtggctcatatgtgtagtttccagctacttgggaggctgaggtgggaagattgcttgagcccaggagttggggctgcagtgagctatgatcaatacattccagcctgagtgatgaagtgagaccctgtctccaaacaatttttaaaaattttaaaaatagagagggaaatctagtttctagggttttgttttggtttgttttgatttgtttttttttgtctttggtttgtttctttatgtaaacagtttacttgttacgtcagtaagcacgtaaagtaaagtagtgctaaataaatagatacagtttaatgggcttcctggaagagggtaggaaagtgaatgcttatctgcaggggctttgtttagcatagactgacctaatgccttttcctgcagcctgtgccaaaatccattatcagttgtacacaacaccttgatttccctgtatacctctgatgctgcttaattaaacatattccatctttttacagatcatgtgaacccaaaagcatttttcagtgttcttcgcatatatttgtctgggtatgtagtcttatgtttgaatttgtttgctctcacttaacaaagaacaccaccaaattctcttggttggtccctaatatccattgggtttggctaacaatttacatccaaaaattcacatggtagaaaaatactagactgttctgttatcacttggccaggaatgtactggagtgggggacaggaaagctagttattttaaaaagagtggtctgtgctagtacaaaggtaagattccattcctagaatagttatgccaaatctgctcaggattatattatttactattctcatgcttgaaaatgagcaggggcaagggggtatgaaaaaaggatcatgaaatccatctcttgtcaccttctgttcagcactagtgcaagatttggtacctgaaaattagcaattaacctaaagaatgatttttctttttttctttctttcctctgatagctggaaaggcaacccccagctatcagacggtctggtgtatgaagggttctgggaagacccaaaggagtttgcagggggcagtgcaggccaaagcagcgtctttcagtgctttgacgtcctgctgggcatccagcagactgctggtggaggtgagtggaaaataacaagaaataattatctcttatgtgaatacaatagtatttggatatctacaaagcaccttcccatcagcatcttatctgagcttatctgatagttttagcagaatcaggcaagtagggatttggttgccatgatcccattttaaaaatgaagatgcagaaacttaatgagagtcagtgacaggttccttgtgaaccagctagaaagtggcagagctggccaggtgcggtgactcaagcctgtaatcctagcacttcgggagacctaggcaggtggatcacctgaggtcaggagtttgagaccagcctgaccaacatggtgaaacccggtctctactaaaaatacaaaaactagctgagtgtggtggtgggtgcctctaatcccagctactcgggagactgaggcaggagaatcgcctgaaccccacaggcagaggttgcagtgagccaagatcgtgctactgtactccagcctgggcaaaagagcaaaactccatctcaaaataaaaataaaaaataaaaagccaggtgcagtcgctcacgcctgtaatcctagcactttgggaggccgaggcgggcggatcacaagatcaggagatcgagaccatcctggctaacacggtgaaaccctgtctctactaaaaatacaaaaaagtagctgggcatggtggcgggtgcctgtagtcccagctactcgggagactgaggcaggagaatggcgtgaacccaggaggcggagcttgcagtgaaccgatatggcgccactgcactccagcctaggcaagagtgcgagactccatctcaaaaaaaattaataaataaaaacaaaaagaaaaataaaataaaataaattggcagagctttcctcacacccaagttccatcttgaaatctgaacatgtctataaagactggttgactccggtgaagccaatatcacatgctctgaaaatgtatgatcagactcagaaagagacactcacctgcaaatgagacagggctgttagtggggagataaagacctcagtgacaagcagagtctgggccctgctcttgttcagctgtcccgtggccccagccacccagagcaatgcctgcaccaaagtttaaaggtgagccacattcattgtatgccttctaggggcttagctggaggggaggaataagctccaagaagaacttctttttaattttctctgttttgttaaacttctgtttaacagtcaaaggggaaagcatcgggctgggtaaaaacatgagtttttcttaatttgagcactcatttttaaaatttttttatcatatttaacttttttattttagattcaggggatacatgtgcaggcttattacacaggtataatgggtgatgctgatgtttgggcttctaatgatcccctcacccaagtatagaacatagtgcccaataggtagtttttcaacctttgctttccttcctccctccctcccctatttgaaatcctcactgtctattgttcctatctttgtgtccatgtgtactcaatatttaactcccacttatcggtgagaacatgtggtatttggttttctgtttctgcattatttcacttaggctaacttaagctaatggcctccagctgcatccatgttgctgtgaagcgcttgatttcattctttttcatggctgtgtagtattccatggtgtacatgtaccacattttctttgtcccatctaccattgatgggcacctgggttcattccatgtctttgctgttgttgaacactcatttaaacacaatctcttaaactctcttaagaatcagtcataatctgtcaaatgcagattatatatgccccttgtctataccatcagcttcttacagtagaaaagagagaaagaaagtgcaaacaaaggccaggcgcggtggctcatgcctgtaatcccagcactttgggaggctgaggcaggtggatcatctgaggtcaggagttcgagaccagcctgaccaacatggagaaaccctgtctctactaaaaatacaaaattagccgggcatggtggcgcatgcctgaaatcccagctactccggaggctgaggcaggagaattgcttgagcccgggaggcacaggttgcggcgagccgagatcgtgccactgcactccagcctggccgacagagcgagactctgtctcaaaaaaaaaaaaaaaaagcgcaaacaaaaatacttattgtgagaaaatgagtttagctcattcagttttcaaaattaataatattttacaataattacgattgctagtagcaagactaatagccaaacattagccttcaaatagaatgaccttgacctcagtgaatgctatattggtgatctcctgcccactctgacctcactctgcctttctctcctggattggggaatgctgtgacctccgtatttcctctttctctttttcctataggacatgctgctcagttcctccaggacatgagaagatatatgccaccagctcacaggaacttcctgtgctcattagagtcaaatccctcagtccgtgagtttgtcctttcaaaaggtgatgctggcctgcgggaagcttatgacgcctgtgtgaaagctctggtctccctgaggagctaccatctgcaaatcgtgactaagtacatcctgattcctgcaagccagcagccaaaggagaataagacctctgaagacccttcaaaactggaagccaaaggaactggaggcactgatttaatgaatttcctgaagactgtaagaagtacaactgagaaatcccttttgaaggaaggttaatgtaacccaacaagagcacattttatcatagcagagacatctgtatgcattcctgtcattacccattgtaacagagccacaaactaatactatgcaatgttttaccaataatgcaatacaaaagacctcaaaatacctgtgcatttcttgtaggaaaacaacaaaaggtaattatgtgtaattatactagaagttttgtaatctgtatcttatcattggaataaaatgacattcaataaataaaaatgcataagatata

SEQ ID NO: 553 - DNA, 65301 bp, Homo sapiens
aactgaagcaagctgtgcccaggtccctgtaacagcaggtggctttctgacatcagcagagactggtgctttttcccaggtacaaaggacctccagaccagagccagccagcagcaaaaagagcatggagctgaggagtacagcagcccccagagctgagggctacagcaacgtgggcttccaggtgagcagagctttcctcttatgttaaaggccttcagtggaaaagctgccctttccttagccccttggcaagtttcttacctaagcagggagattatcaggacaatacgatttttaacggcacactttaagcccattattttttcttcttgggctcttctgggttgacaaacctgaaaagtctcttttaatcgatgtgttgtgatccctatggtcacttagaaacaagacagccttcttctcttgccttttttcccttctggctcacagcaggggtccattatttatcttcaggcacttttccaaagaactggtgagaagggaaaaatgggggaatttagatcctggctggggtagtgtctcagggttccttttactcaagccaagtcctggagcccctgtcagatggccccggtacctgccccagagcagctggattacgcaaatcagtctcacttcatcaaccaaaactcactgagtgattaatgctgctcagcccgaggctgggtgcccgcagagacatagaaggagacctgtcagaaacaccaggctattttgactgggtctgggatggggatttccagggctgtttttaggtgtgcttcctttccttagctgacactcagcatgggcgctctggagaagatgggaagcctgcaccggcaagtgtcaacaatcccttggactttacggtctgctagatgggcaaaacaaaactttgaggtgctagccaagaaaggaaagagggaggtaaaagggctttgacaggagttcagactccagcacccacaaattcctgtaacttcccagagcccaagtttgatcatctgtcccatggtcacagtgatgcccatctccatgagtaggcatcgggttaccacttataggtcacaagtgtaggagaggaaacaacttcatctaccctcttaggttgagtgcctgaggcctgcaaattaaaccaacataaaacagattagcaggagaaaaggcacgcaaattttattcatatttaaaatctcacatgtggctggcagtggtgcctcatgcctgtaatcctagcactttgggaggctgaggcgggctgatcatttgaggtcaggaatttgagaccagcctggccaacatagtgaaaccccatctctactaaaaatacaaaaatcagccgggcatggtggtacatgcctgtagtcccagctactcgggaggccgaggcaggagaatcacttgaatctgggaggcagaggctgcagtgagccaagatcgtgcctctgtactccagcctggttgacagagggagactcagtctcaaaaaaataataataataaaataaaatctcacatgtatgagagcctcacataaaagaaacggaaaaacctaatagactcaggagcttatataccattaaaacaaagcacggcaaatagtgaaatgactagacaaaggaaaagagggttatgcttttagggacaataaagtgggggtgggaggtggaaataatggaagataagggttaatttatcgaggtttgttcatgcagatttatctcagcggcatctctgtctttggtgataagggttgctctcttccttgtatgagcaagcgggacacctgtgcaagggaaatatcaataaatgtgctgcttttaggaagatgggggatgggggagggcagagagctctttctgtgtctgctttctttttcatagccttcagttcaaaatattcttgtgccaaaatgtgggcatttggagggtggcacatcctgatctcttctctaagggctaagtgagggggaaaagcataaagcatgggcccattctgattccagagaatggaaaggatggaattggatagagtcagaggaagtatggcagcaagaaaatatatctgcaatagagaaggtccatgtcacagcaactggctgctcccagggaggagggcacacaacggtggtgatccctcactgtcttctagcaaaactgctgttttgtgggggaaacatccccctacacctgccccaataaaaagaaggaaaaatgaaaggaagcttcctcctagttctgtaaaatttcctgtcatccttactcattggattgattgaaatttgaatttctacatttcaaaatcaaaatagtgaagacaatttgtctttcaagagaatcagaggcctcataactcctgccaagttaataagtatgagtcttaccttgtttgacattcagctctcctgctacattatcttctttaaggaaaattaattgattgtaaaatatgtgctacttcactcgcattattaaatatgcattaacatgccaccaggacttccaaataagttaggatgcttacttattcaccttgtcctagtctgtgaattgtgctagaaattcatttttcttcttcaaatattaagagtgcccttggtagaccaaagttctaattttactaagtagaactactttcacagcttgaaatgctgatatgggttcccaaaaggcctgtgcctgtaagacctggtgcaggtgcaatggttatgcatatctatggattacctggacaggctctcatctggactgttcctcaaagaagggagcaccaattgctgttttcatggagctagtactccagtgggaaaggttaaacaggagcacaaagtcagtgatatgggttataagagagaaatgatctcacctccaagaaaggatttcacagctagagcacacttcatacatgagagtggattttgtaaccaacgatagaaatgaatgttagggttttttttttctaatctcattttattgtacctctaaacgttttctatgaataaggaacttatttctcatatggctgaggatggaaatgacttcattcaacagtagttgcaaataagacgtttgctatttatgaaggaagttcggattggcatttaaagtattgcgtgtatgtggaatatctaaggatttcttattttattttaaaatattttttaaaccttaaaacagtcagcaaactggctcttgattttgtgcaagatgttcccatcagttcaggaaaaataactgcctgaaaggacaaagtacacacacacacgtgtgcaaacactcacacccacatacgcatacacacacgcgcgcgcacacacacaggctagcatccccaggcctcaaggttctaagcagggcatctcaaacccagcagagtatcataccaacaacacccacacctaaaaacagtgactgggttatttctatttattcagtagaatcatcaactgccccctagatatggccgcctctaagaagggataccaactcaagaaagaataatatgctcttcttgccctcaaggagaaggacaggcagaaataagcatgcaattacaatataattgatgttaaggaaaatggcggaggtttgcaccaagtgcattgtattcttatatttattattttttatattttgtcttgctatcttaccagggctggtctgaaaccctggcctcaagcaatcctcctgctttggccttccaaagtgctgggattacagtcatgagccacaacacccagccagcaccaagtgcattgtaaataatatatagctggagctgagctgactgaggagtctgtgacagcatcaccaaaggagggagaatttgattagggctttaaggatggtcaggtcacagtaggaggtggggtgggcagagcactgcaagcagagagaactatctgtacagactcagaaccctaaaggagaagagcacatgagcctgggatggaggaagggaacacggtatagggaaagggggcaggctggcatcaggtcaggtggcctctgcgtgtgctaaggcattttagaaggaatcgctcagaatttacgcagtcaaattgtgattttttttttgagacagggtctcactctgtcacccatgctggagtgctatggtatgatctcagctcactgcagcctcaacctcccaggctcaagcaatcctcccacctcagcctcctgagtagctaggactacagacatgcgccaccacacttggctagtctttgttttgttttgtgttttagagatgaagtctcaccctgtcgcccagactggagtgcagtggcatgatcttggctcactgcaacctccacctcctgggttcaagcaattctcctgtctcagcctcctgagtagctgagtttacaggcatatgccaccacacctggctactttttttgtatttttagtagagacagggtttcacaacgttggtcaggctggtctcaaactcctgacctcaaatgatccgcctgcctcagcctcccaaagtgctgggattacaggcgtgagccaccgtgcccgacctaattcttgtatttttttgtagaaatcgggtttcaccatgttgcccaggctgatctcaaactcctgagctcaagtgatctgcctgcttcagccttccaaagtgctgggattacaggtgtgagccaactgcaccaggctgatttttttttttttaatattactttggtggccccattgaaagtgcttggaaaaggagagggatttgtgtgtggctgggacatccgttgggaagttactgtcataatccaaaccaggctaaaggcagtggatgcagacactgggacggaggtactaatactgatgaggtgacccctccacaatgaaattcaggagtaaagatgagggcctaaatgctgctctggctctgaagatttctgttttctcctctgtaaaagagcataataatggtacctatcttgggattgttgaaataattaaataagctaatattatatatgtataatggacattttatacacacacacacacacacacacacacacacacgtatatacatacttgtgaaaacagtgcctggcacatagtatgaacataacaatagcagcttttgatgctgagcagcttaaggaaagtgtggagtcaatgtttccagcttgggatgtcaacttggaagtgattccctttgtttatttattgctgttgttttaaatagagacagggcttcactctgtcacccacgctgaagtgcagtggcacaatcatagcttattgcagcctcaaactcctgagcccaggcaatcctttgacctcagcctcctgagtagctgggactacaggcacgtgctaccacaactggctaagtttttttattttttatatttgtagagacagggtcttgctatgttgcccaggctggcctctagtgatcctcccatctcttcctgggtttcccaaagtgctgagattacaggtgtgagccacctcacccagcctcgggcaaggctttatttaggtagaaaatctaggaataaagttagagcaaaaaagagagtgagttctctttgaggcctgttggttgaaattaagttgactccaggcatcttcatgaaggggtagatgaagtaggaagcttgtagcatacgttcacctggagctcagaagaggacacacatttgggagctgttagcatagatatgagcgcggataagaccactgtgagggaagcctgggaaacagtagcgcttaaggagtggggaagttagagatgtcagagaatgaagcagagggccacagggagagaaagagcagcagaaccaggagaggggcgatctggagaagtcaagggaaagtagaaccacaagtcaacagaaaagactccgaaaggacagaggagtctatagagtgaggccacgggttcacttgacttgccagctaggaggttactggtgacgctagggttggggaaggaggagaagtttgtgttatgagcgggagttaggctaggaaaaatggtagcagaatgaacgctcttctggtgcagtggtggtgctagggaggggcggggaaggggaagacctagggcaggcaaaggcagttgtggggaggtgtttttatgttaaaaaaaaaaaaattcgttgtgaaatacaacatacagaaaaatacataaaaacaaatatacaacttataaggcgaactgtcactcaggtcaagaaacaggatattgccatccctcagggtccagccctacacatttcatcactgctgcctcccttccctggggtaaacccaaccaggggtgactactgacccaaatgtggggcaattacttccttgcttttctttataccttaacttctaattatgaatccccaagcagtacctttgcctggttttgaactttatataatagaaacacaaaatgtattctttgcttatattgaaactttttttttgtttttttgagacagagtctcgctctgttgcccaggctagagtgcagtggcgtgatcttggctcactgcaacctctgcctccccagttcaagcgattctcctgcttcagcctcctgagtagctgggaatacaggcatgagccaccaggcccggcttgtatttttagtagagacggggtttcaccctgttggccaggctggtctcaaactcctgacctcacgtgatccacccgccttggcctcccaaagtgttgggattacaggcgtgagccaccatgcctggccatcagctctctaagattcacatggtgttgcatgtaactgcagctcatcccatttcataatgcacaggattctgccatgtaaatattccacaacttatacattttgctgctagtggacatttgcgttattaagtttggggtttttggagcttctacaaacattgcagctagggacactgttatccatgccagggggagtatctgtaataaatttactctggggttgtacttaggagtggaattgctaggccactggaataaacatatactttcaactttgctgatagtgtcagattggtttcctaagtgattttaccaatttgcatgcctatcagcagagtgagtattcccatttctcatcattattcagctgaccttttaatgtcaaccattctggtgggtgtgtagcagtatgtcattgagtttaattaaaattttcctgttattggttgttagatgccaactttttaaatatttgctcaactttcttgcccattttctctactggattttttccatttttatttgaaagagttccttagatgttctggttacaagcctatgaaaggaaattaaattttgggaccccaaactcatttaaccaaagggaaaagtcaagctgggaactgggtcacgcatacctatctcccccttttggttcctaaataagatggctacaagatgaaaagctacacgcttcccccatgttttgcccacaaggaaattcctggtgagctataaaaacttcaccatggcaatgtaattgataacttatctttacaggtgcagtcaccccagatacaaatgcatatctgattgttcccctaccccatttcgtctgtattatcttatgtaaaatgcagattctccacatttttcctttgccccctttgtttacatgaaaactgtgtgcttctcactatcccgccctttctcctttaaatttggagccctcaaaatcatctctggagaaagggatagacctgtctcccaggcagttccttaactttggcaaataaatctgctaaaatgattgagacttgtctcatcattttcctcgattgacaagccctttgtcagttatgatttgtaaataccttctaccactgtgaagccatcttttactctaatggaatattctgaggaacaaaagttaattatattggtcccatttaggaaacattgggacaaaagttaattatatatggtcccatttaggaaacgttgcttctctttcctgtatcttgtctaaaatatcttttccaacctgcaaaatcatgaagatttttttttcgaacaagtgtaactctttattaagataaaattgtttttattaaagaaatagataaaaatgattaagtacaatcaaatggctccaaaagccttacaatgaaagcaacagtcctgccagttgttctttccagaggcaagcacttctcattctctcagtttttccttctggtagttaccttcatgggtttttccaattattatttttttagtttttcaagtgaatgcatatattaatacatgaaatttttaaaagcctcttcagtttataatgcatcctaccagtcccctaccctatccctcctaattctccagagcaatgacttttaactcttttagcaatgtcctctatttttttctcacataactacttaggcatttcttgattgttttatacattatatagtgatttcttgatatgacagatgaggatttagctcttacaccatcactgtcttcacttttcctcccatattgtcccaaagtagttaccagatttagaggctaagcagtcatcacttcattatgacaatgtccatattgctcattgttgagaacaacagggtattatgctctaaagtcattaggatattttctaaaagcttatactttcattcacattgaggatctctattccccctgaaattgagtttaatgtatagtgtaaggtaggagtcaagtttgctttccacacgaacatccacttattttggcattattattttttaaatttacttttaacaccactcagtgatcatcaacattgctttaaaaaagaaccttttccccactccacagatattttgccacgtgtccatatttgggagaggctttttggaacagggcaactgaaagatttttccaaactcagaggagatggggaagaatccaaagagatggaagttaacagcaacagaggtcaaaacagttcagaatttctaagaggaaaatgcaggaatgttttttaacacatttattaaaaggcatctcttggaatcccaactcaagtttcctcctccctgtgaataagcaatcaatcttaccacagctgctctcagaggcacagaacccaagcttgctctgaagttagttgggtggaactcacttacgaaagtcttgggagaggactaggctggggaaatgggcctcactctgcacaaacacacaggaaaggctgagttactccatgagtaagccagtcaagcaggtttggagagtttgttaaatggagtttacaatttgggagatcatgtaagtgtaagtccatcagggatccaaacctgctggagtacaggtgtagacttcttgtcaagcacgtactttgaatacaaaagttctaaggtaggaagtaactatgttatgtagggaagaagaatattgtttctccttaacccactagcctgggaagtcaatatgaatcacattgagtactctttcacattgctcaagaggcgctcggctggagcttcctatattcaattaaaacacacacacacaaaaacacatgacaataattcgcttttgggaaggaggttaaaaaagaaaagtatattctctactctttcctcaagtttgcatgatcacacctagacttatttttaggggaaaacagtgtaggggattgtaaaccaagtcacttccatggcatctcagagagagagggtataaggatttagtttttcctcattcaaacactcctgaagtgattccccttgaaattgaggagccacttactcatcagtgttgaggcactggaaagaaaatagaaaataattaataatgtagataaagatacatttttgctgagggctaaagcagaactttctaatatgtaacactagccagatatgtaatttaaaacttttctgcaagcccattaaaaatgcaaaataaagtaggtataactcttcaccttattttaactatattttatggaacctcatatattgaaattaatgaaataatttatatttgtttcataccaagtctttgaacatccagtgcatattttaaacatatagtacatgtcaactctaatgctacatttttatcagaaatacttgatctgtttttagatttcataaaatgtatatttgtaaaaagtagattcataatcaagttgttctaaacatgcctgtttttcaatacatggatctaatgttcagtttttaatttaaatttaaattagttaaaattaaattcaggtccttagtcatattagtcacatttcaagcactcagtaaccacttgccactgatggttattctattggatcacccacgtaagcatgtgtttttggttttagagttcatacacacacacagatctggttatccttcctctttaaggacctgaccaccagatttatgccaaaaaattaaagtaacaactttacatttatttctgtaatatcagtagtaatatctcctctttcattcatgaatttagttatttgtcttctctcttttttttccttggtttcttttttccttgacatttccttgttgggaggtttatggttagcaattcaatctcttcacttgctattagtttttttgagctttttttttcccttaagtaagttaagaaccaacttttggtttcattgattctctcttttgtttttctagtctatatttcatttgtctccacgataatcttcattatttctttctttctgctaactttggatttagtttgttgttctttttctagttcattacagtagaagattggattattgatttgagatcttacttcttgataatataagcaattacaattataaaattccctgtaagcactgctttagcgatattcataaattttcgtatattttcatttttgttatttatttatttatttgtgatgagggccatgctatgttgcctaggctggcctcaaactcctgggtacaagcaatccacccaccccagccttccaagtagctgggactacaggcatgcatcactgtgctcagctttatttttctttcttcttctttttttcatgagacagagtctcactctaagctttatttttattaattctcttttttttataagacagagtctcactctgtcacccaggctgcattttaattattatcaaactattttctaacttccctaatgatttcttctttaatccattggttatttaggagtgtgcttaatttcctcataatttataagttttccccaaattgtggttggggaagacacattatctttcaatatttttaaatttattgagatttgtttgggcctaacatgtgatctagcctggagaatgttctacatgcacttgagaagaatgtgtattctacttttgttggtggagtgttctgtatatgtctataaggtctagttggtttatataccactgttcaattcttgtattttcttactgaccatctctctagttctagtcattactgaagatggggtaatgaaatatccagctattgatgaactgtctacttctcccatgaattctgtcagtttttgcttcatgtgttttagagctcttttattatatacatatatgttaacaatagctctttgataaattgacccttttgccatttaaaatgtcttttgtctctagtaacaattgttgtcttaaaacctatttcatctgatattattgccactcaagctctctttggttactatttgcatgttatatctttcccatccttttctttcaacctatttaggtctttgaatgtaaagtatgtctcttgtagacagcatatatttggatcatgggattttgttttattttggtttgtttgtttgttggagatagggtctcattctgtcacccaggctggagtgtattagggcagtcatggctcactgaaccctcaacctctggagctcaagcaatcctctcacctcagcctcctgagtagctgggactacaggcacctgtcactgtgcctggctaatttttgttttctgttttttgtttttagagtctcactctgtcacccaggctgaagtgcagtggtgttattttggttcactgcaacctccgcctcccaagtttaagcaattctcctgtctcagcctcgcgagaagctggggttacaggtgcccaccaccatgcccagctaatttttgtatttttagtagagatggggtttcaccatattggtcaggctggtctcaaactcctgacctcaggtgatccacccgcctcagcctcccaaagtgctgggattacaggtgtgagccaccacaccctgcctaacttttctatttcttatagagatagggtttcaccatgttgcccaggctgggatcaagcaatttgcccactgtggtctcccaaagtgctgggattacaggcatgagctaccacacctggccagatcatgtttttttttttttcctttttaattttattttcagatcatgggtttttaaaatccgttcttcaaatctctgccttttaattaaagggtataatccatttatagttaatgtagttactgataagataggatttatatttttattttgtgtgaatatgtgtgtgtgtgtgtgtgtgtgtgtgtgtgtgtgtgtagtcttttccccctctattacttccttcttttgtgttaaatagatattttctagtgtattggtttaattcttagattggcttgttgtttttcccaacagttaccaccacctcaggcagctacctatgttaaacaattgccaccagagaaacagtactgggtgaactctgagtctgatcaactaaagatgggggattttattttatttttctttctttttttttttttttttgaaatggagtcttgctctgttgcccaggctggagtgaggtggcacaatgttggctgactgcaacctctgcctcctgggttcaagcaattctcctgacttcctgacttagcctccctagtagctgggattacaggtgcaagccaccatgctcggctaatttttgtattttttgtagaggtggggtttcaccaggctggtctcaaacttctgacctcaggtgatccacctgcctcggcctcccaaagtgctgggattacaggcattagccaccgcacccatccaagacagggaggagtttctaaggaaatgcaaaatagatcaaataatggcagttatctgagagttggactttggggtaactccaatctcattttacccccttcaaaacggctagactcctagttttcatgattgcagggttgttgaggctatcatgagtctgtgtagaaggaaacagaactaggataatttaagacaccacaaagcatgatgttctgagattctgagtcattttatttgaaaagcattctctggattgctgcaagtctttttttttttttttttcggtgttctgaaaaagtagttttgacagttttgtcagtgtggtgaatggtaccagccacatttctagactagaatgctttggatgatcagtcaggagtaggacaagagccgaggttttcaagattacagccatcactactgccttttaccaaaactggggaaaataattgaggcccctaatggtcacagaaaaaggaaaggagaaagagattgaattctgttatttctaccataagggtcccaagagagatgccctcctaattttattttatcttattttatttttcccctcttgattttaagagagtttttttgaggtgctatgttttttgggtgtttttgtttttgttttttgagacagaatcttgctctgtcacccaagctggagtgcagtggcatgatctatcttggctcactgcaacctctgctcctgggttctagcgattctcctgcctcagcctcccgagtagctgggattacaggcgccaccatgtctggctaaattttttggtatttttagttgagatgggatttcaccgtgttggccaggctggtctcaaactcctgacctcaagtgatctccccacattggcctgccagagagctgggattacaggcatgagccaccacacttggcctgaggtgttatgttttgattgaacagagagtaagacctggttgttgttgttgttgttgttgttgttgttgttgttgttgttgttgttgtttttaatccatctataggcctagacagattgccacaaggatgtcatgtcaggaatgattggaaaatccccaattcagccatgaagccacaggctttaattggctcacaaggcaacatgttctgcaagcatatccccaaacttcagagagtaggctgcagggaggtttcagaaaaatgctcttacttcagttaggatagaatcaagactggttctcaagctctaggttttgttttgttttttgttttgtttttttcttttgataaccttggtaccaataggctccagttttattttttattactgatgataaaatctccactccagttaattactttaaaacgatagtggtggtccctgctgaaccatcttgttcagacattgttgatgttgaatggagaagctgggccatggatgcttcctgagctcttattagtcagattaaaaaaaaaaattcaaaggtgagtgtatctggaattttatatagaatagaaatgattaagcatgaattccaaatctgtattattccacagaagtttggaactctcttatgattgcagatacatgcagacaaaagcacaacacgatttccactcaaagccacgattctggatctttgatagctgctacttctaccccacacaaggactaggtatttaacctagtccttataagaagccacttacagccttggcatgattagttctcttctttttcctttaaaaggacatttaaaaaataaaataaaatggtatgcatgtcttgtgttgtttgaaagtaaaatggagatagagatttcttaggaaaatgctgtgagtcacctggctaaggagtcaccggtcagtgttcagaaaggaaggggatgattaccaggaatgggtgagtcaggaagccaggaaatgcacctgaagacttctcaatcttccttctaatatcctggttcaaaactttgtttttgttttcattttctctgagggccaaaactctttgacataaagtatggcaattattgattcaacaaaaatttattgacattgtgccaggcattatgctaggagctggaaacagaaagctagtttggttaaaattaattaaacaatggcaaaccaacacagcacagtctgtgaaaagtctcattcatggcaaaacgtgatctcacctactttcagggtcagggagtcactccatcttccgaacatttcaaatgaacatttaaaattttatatacttttatgatttcattcatttattcaacaaagtatattgagcaactgctctgtgctagatggaaggaaaatactaggtagggcacaaaagatataaatccccaagctagcatgtcaagcattattttttttcatgttacattatgtggaaaaatcaaggcctagaatgggaaggtaggattccaagacaggactccattaaaaaaataaataaaaggtaggagaggcatgagctgggagataaaaagagtagtaaagaaaggcaaacaggaatagacaccagttctcttgatttacctcagggatcctcattgattgcaaaatcttggtttctcaaatccaaaaccaatgataagttaagcttaaaactacatttgtaaattctgtggactcaggaacattccagaataaactagccagcaacctcataaggggttgtaattaaagtaatggtaaacattcctccataaaacatggccctaaagtaagccattcatgtgagtcaaggttgctttataccatgggagagggtcagctgtagtccaaaaggggccaagacaggcaaatctgcttatttaatgatccagttgccttactctcctgacctgctcaactttgacagaataccaaaggttccaaacagcacaacctatgaagatgtacggtcattcactgacgggtgctattcccctgtcagtttccctgcctttcaatcacattactttacagtttcactagcttttaagactttttttttttttaagacagggtctcactgtgtcacctaggctggatgtggagtgcagtggtgtgatctcagctcactgcaacctccgcctctgaagctcaagcaatcctcccacctcagcctcccaagtagctgggactatgggtgcatgccaccatgcctggctaatttttgtatttttagtagagacagggtctcaccacgttacccaggctggtcttgaacttctaagctcgagcaatccacctaccttagcccccaaagtgctgggattacaggtatgagtcacggcacccagcaaaaaactttatttttctaatttaatttactgagccctgattttcgcatctgccaaactccattgttcggaaacatttgcaaggaggaagttagttagagagtactggcctaatttgtgcagccagggaggtttgaaagaaaaattgcttaatcaaggatctgacccatacagataaaacaagttgggagcaccggtctatttacatggtgtgctgggtccagcaaggagaggatagagagacaaaggtgcccacagtgacatgtttaggagccagcaaatgttaggcttcctgttggcccacataatcatttccttgttcccctacaaagcatgaggtctttaggtcagagaagaggaagaaagaagtaggagaggaaggatttagaaagcacagcagtgggtaggagaggtagcttgtaatgcttctagtagtgactgtactgtacaaggcctagaccttggcgagagatcagtggcctctcattaaggaggacatgggagagggaggaaagtgatgagcttctgaagaaagccagatttggaggggagggggatgtcattggggaaggtcaagggagggtgatagatgaggggtgttaaaaatcaagtactggggtggggcacagtggcccgattatatccttgtttttctttctcatgcctgtaatcccagcactttgggaggctgagggggtcggatcacgaggttaggaattcgagaccagcctggccaacatgatgaaaccccgtctttactaaaaatacaaaaattagccgggcacagtggcacacgcctgtactcccagctactctggaggctgaggcaggagaattgcttgaacccaggaggtggaagttgcagtgagccgagatcatgccactgcactccagcctggatgacagagcaagactccgtctcaaaaaaaaaaaaaaaatcatgtactgaatcataaaaatgacaaaacataggttcttcaggtgaagagttgaggctttagtcagtctgcctggattttccaggcccaccatttaggcaactcatctatttctctatacctgtttgctcatctaaaaataggtatactaatactccacatcatatacttgctgggaaattcaggtaatgtactggtgcctagcaaatgctcaaatatcagctattaatcaaccatttagttggggatgctggtacaggccaaaccaaatcttgaaacctagatgtaaaatctgcctcttcctatagcaaataccgcaatccatttatgtgaggactatggaagttgccagcatgccactctgagtagtcatcatgtcagcaaaatataaaaaaataaataaataaaacctcaaatcccttaggtccctgccagcccaggagagcatggctgtccttgtcttgcctcatcaaaggactttccaaagttatttttctaacatcttgagtcattctgatctatttcctatttagtcaaatgtatttcttaaatgttttatatactgtaaattcattctttcttttttttcttttttcttttctactctgttgcccaggctggagtgcagtggacaatcttggctcactgcaacctccacctcctgggctcaagcgattctcatgtctcccaagtagctgggattacaggcatgcaacaccatgctgggctaatttttgtatttttaataaaaacagggtttttccatgttggccaggctggtctgggactcctgacctcaaatgatcctcccacctcagcctcccaaagtgctgggattatgggcatcagccaccacactgggcctcattctctgtgcttctaatttgagtaatttacatttatttacttagcactctttggaaagaagagcttgatggtcaaggtgattttagaaatcaccaaaaagtaacatttttccaaatgtagacctgagtttgatttcatagaacaggaaggaagatcccacgttgtgatacctgctgcataaaccaatgatagcagaagcaaaacatgactttgaattagcttaggggctattcaagatgttccaagatgaaggtgtcattaatgatgtccaatgtctctttacactacctttatctctccctctctttttcttcttcttctatcttattccaacaatagaatttaataaagagctgaagccatatttcctgttcttgaatttagaagtcaatcatttcatgaccactctgaccaaattgcttcacagacaggtgttgttagcctcttaatatcttttactgtgctgtaaataatatgtagtatataatgtttcttcttgttgttgttgttgagacggagtctcgctctgtcttccaggctggagtgcaatggcatgatctcaagtcactgcaacctctgccccctgagttcaagcagttctcctgcctcagcctcctgagtagctgtgattacaggcgctcaccaccacacctgattaatttttgtgtttttagtagagaccgggtttcaccatgttggccaggctggtctcaaactcctgacttcatgatccacccacctcagcctcccaaagtgctgggattataggcatgagccaccacgcccagcagtgtataatgtttcttttttttttttttttttttttgagacggagtctcactctattgcccaggctagagtgcagtggcgcaatctcagctcactgcaagctctgcctcccgagtccaagtgattctcctgcctcagcctcctgagtagctgggactacaggcgcctgccaccacgcctggctaatttttttgtatttttagtagagacggggtttcaccatgttagccaggatggtctcgatctcctgacctcgtgatccgccctcctcggcctcccaaagtgctgggattacaggcgtgagccactgcgccccgcctataatgtttcttaatctcacaaattttgaggatcaggaaccctaaaggaaaaagacttcccactgttggtctagtgtgcccattgtgaaagcatttttataaacaaaaaacaatctataatcaccttgcagtctgaaagttgctgccttcagacagactaggagtttgcctattaaaaacaaatcaaagaagcaaatgagagtaagaataatcttggtttccactgatagattcaatgagattatatccttgtttatcttctttctcatctactggaaggtgttgtgctggtgagaggatttccagttcaccgtggctaaacaggtcacatctttagaacttcaaacacagtggactttgttccaattaactcctagaagtagcaccttgaactttttagtagtctttagcacaactataattaagtaatcaattgtataattcatggttgaaagcttttctttcttttttttttttttcttttgagatggagtcttgttcttgtcgcccaggctggagttcagtggcacgatctcagctcactgcaacctctgcctccccggttcaagcaattctcctgcctcagcctcccaccaccaccctcggctaatttttgtatttcaagtagagacagggtttcgccatgttggccaggctggtctcagactcctgacctcaagtgttccaccctcctcggcctccgaaagtgctaggattacaggtgtgagccactgcgcccagccgacaacttttcttcgaaactccctgagaatagggaccacatatgcaatcccccacacccaaagcagtgtccgtcccatagtaggtgtgcaataaatatttgttggacagagccccagggaagcacatataacattcagagttaagcataaaaggctgatacagcacaggaaaggaaggaggaacagtttaagtagaaggaggaaaataataaagtgtgatatcacaaaagtcagggacagatcattttgaagaggaagtagtctatggtgcatgatgaaaactgaatttagggacatggaaatcattgtctttggcaagggtgatttccatggagtagtaaatgtgcaggccaggccaggcacagtggctcacgcttgtaatcccagcactttgggaggccaaggcaggtggattatttgaggccaggggttcaagaccagcctggccatcatggcaaaatcctgtctctactaaaaatacaaaaaaaaaatgagcagggtgtggtggcgtgtgcctgtagtcccagctactcaggagactgaggtatgagaatcacttgaacccgggaggttgaggttgcagtgagtcaagatcatgccactgcactccagcctaggcatcagagcgagaatctgtctcaaaaaaaaaaaaaaaaaaaaaaaaaaacagtgcaagccaggctggaatgagtaaacataagtaaaaagtacagctagaagatggacaaaggatacttatctatgaatttttggctgcagggcaataaaaaattaataaaggtgcaaatattagcgttcaagggggtcaggggttaagtaatatcgtgtatgggaaagcacagcaccatggctggcagagtcatgagtgaaggcgtggtcacattgctctcagaacagcttctctgtgagtgactttagacttctctggtctccttcccaaatgcataggaagttcttatggcagtgtctttctctactcaaacaaatcagcctaagtcagaaaaaggcaaggaacagtaacgggaaactagagccagtttgaaatagtcacacattaataaacacaaatgatcaacacaagtatcaaaagcaacaataagagtgaaagataacccaacagccgcaagggtaatggtatcttggagtggacaattctgcatttgtgactttttacaaaataatttttatgtttttatttaaaaaaatagagagacaagggttcaccatgttgctcaacctggtctcaaactcctgagtccaagtgacccgtctgcctcagccccccaaagtgctgggattacaggtgtgagccactgcacccagtccatgatgacttttaactagcccccagctctggaaaccctgtatttaaggaagaaataaaaatatacatcaatgcatttggaacaatttaactcaggccttttggtcttattcttgatatggttaatgtcatagataaataaagctgaacactcattaaagtgatgaagatggatttcagtgagtaataaactattgcagtagggaagagggcccagcgtgacctgaagtaggaaattggcctacttatcctacctcctacgttttcttttccttccccttcaagtagccttctaatgattttttctactttggcagaggacataatgtttataatttgttctagaatcataatccctggaatcatcttagattttattatcaaatagattcaaaatgtactaactctctttttttcataatttctccgtttatcatttgtatggcttcttcctctagcagtttcttcaagaaagctcatggaaaccatattcctttttcttttttttttttctgagacagggtttcacttttgttgcccaggctggagtgcaatggcacaatctcagctcactgcaacctccgcctcccagattcaagagattctcctgtctcaccctcccgagtagctgggattacaggcacaggccaccacgcccggctaatttttgtatttttagtagagatggggtttcatcatattggtcaggctgatctcaaactcctgacctcaggcgatccaacctcctcagccttccaaagtgctgggattacaggggtgagtcaccacgcccggcctggaaaccatattctatgaggactcacatgtttaaactttcttaaaactcttattataaaccttcctttaagttttctccttcgggtacagcactccctctctttcccctttccctgacattcccatacatatgggtttcctctgcctcctggctcacaaagttcccaagggaagaatgttaacagtgttctgaagccatagacattgctagtgttacagccactcacagcagcatacagagacttgacttcttgcacccaatccaaagatccctcagcattgaaaggtaacagtgagccccaggctgcccactgggtctcttgccacaggtactgctgctccttacctggcctctaaacccacacaggcaggcaggtaaaacaagaacatctctggggaatggtctagctagtgcccattaactcacactaaggattatgcacacccgagacttgagccagaaagttacatgaaccaagtgagtcaagaccaatagataacgatcaaggacttctaaaatacagtctttgaaaatgcaatcattcctaggcaaaatccatgcagtcgaagaataacatttagagaaagggccttaaaacatttgacattggtagatggtaagagtaaaaaaagagttgaagtggggtatgatcccaaacaattttgagagatcagattcaccaaacagatgttgattttgataagtctaatttcaaatacagaggacaacacgactgtaaatgccccagaacaagcgagaagcaaactaaaccatgaaattaacttaatagtcaatgagcacttactatgtgtgccactggatggagccacccaactttgttaggtaggtactgcctccattcccacaagaagcaagaccactgaatgagtgcaagaccactcatgcaatttgctctggcaaccaggccagagcaaattctatagtgaagaaaggctctcctagcacagtggtggtacctctgcagcagaaaaacccccaccacaagaactgagaaatggaagccaggctgtgtgattacagcacagtgccagggagaggctgaagaatgtcaaaccagccatgatgacaagacatgtccacagaggcaggagtccccacccatgttactcaaaggatatattccacttaaaaccagcgtacagggcaggaagaccactattgtggcttgagaaatgaccacagagcctaggtgtagctaaaagtggccacaagcttctctggaactttcaacacttctataatttatacctttgtcttttaatatctggagttcaaatcaggctttctaagttctaatttccaaacggaatttaattcctaggcacactactgtgtcttttgatcttcaccaggcccaaagaatcactcctctataggcacaagatggtctggggagggacagtctgggctgagattctaccccagccatttctggctacacaacccaagtcaagtgatttacttatctttgcctcagtttcctcatctgtgaaaatgtggatcatggtacccacctcataggcctcttggagttgttgttgttgttgttgttgttgttgttttgagacggagtcttgctctgtcgcccgggctggagtgcactggtacgatcttggctcattgcaacctccacttccctggttcaagcgattcttctgcctcagcctcccaagtagctgggactacaggtgcccgccaccacgcccagctaacttttgtatttttagtagagacgaggtgttaccatattggccaggctggtctcgaacacctgacctcatcatccgcccgccttggcctcccaatgtgctgggattacaggcataagccaccacgcccagacaagagttttacacagtgtctcctgcctactaaatactgtatcatttggtgcaaaataaaagcaaaaaccaaaagtaacaagagaaaagttagtttcatcccaataaagttgaggtggatggtacagagccggggtgagcctcctgctcaaggcttccagggacccaagttcctcccaactcagcaccctgacatcacaaggatgtgggccttgtatccatggtccagttggaaccatcctcacactgggcagcaagacagaggaaatgacaaaaaggaacaagtgcacctgccagccatccctggcggaacattccccgagctgcccccaacagggcaccctttctactttcatttcgttgccagaacttagttgcaagggaagcttggatatgtaatctttttcctaggtgaccatgtgtcagctaacattctttgaaaagggataccacaaataggggagtcattttagaaatttccagtgttctagaagttattatatggtttagaaagtgaatgaaaggaagaaaataaaaatgcctctgtccatctctgcctccctctaatagccacatagaaagtgcaagatcaaagaaatggtgggaaacaaaccccaggcacaatgtactcctggttactaggctgtcccttcaaagggggctcaatcaggaccctcatcttttagcacacctaacaactaaaactaactagagaaattaaatgtgtaagctgtaaacggcctagacatactcacaatgcaattccctcacctttcttacacattcaacagagggatagattttaccatgagaacgcagtcgtggttgtagggcgttaagtgtgcaaaggtatttagtaatgtgagttgctaaataaatggaaagaaacattgagctaagacattatctggggccccatatcacagccccacgactctaatttaaaaagaagaagaaagacagttgtcttaatggtcattttccaggtaccagtcaatatccacaataaccccactaattctgttggaaatcctcaagtgggagatattgttcttccagaaaatactaaaaggccaaggcgtatactctgttgggggccaaataagactattacacagtggagaacaaaaccacacgtgctcttgttgccacttaaaggagtgcccactctatccctcaacacacacaccttccactttcattaactttaaaaacgtaggatccacccgtgttccaccagtagttttcagatcctgccaccaggtggcaggaggaatcaacgtcaagaagctgaatctcctaatagaattagaaaatgtcaggattccgtaaggatccgcaagaaccccaaatccaaactgtgttgtatgaatgagggagttaaggcttgagagaatgtggcctgctcagtagggaccctaaggactagcccctcagtgacctgtgttctgttactccaccaattcatgtttggttttatttttaacttagtattaaggaacattttagcatccaccaaagtaggagaataataaaatgattctccgggtacctgtcagccaacttcagcaattagcaacattctgtcatcttcccatactatgtatattttttcttttcatgctgtttgtttgtttgttttttgagactgagtctcgctctgtcgcccaggctggagtgcagagtggtgtgatctcagctcactgcaacctctgcctcccaggttcaagcaattctcctgcctcagcctcccaagtagttgggattacaagcacctgccaccacgcccagctaatgtttgtatttttagtagagacggggtttcaccatgttagccaggatggtctcaatctcctgacctcgtgatccgcccaccttggcctcccaaagtgctgggattacgggcgtcagccaccacacccagcccatgctgtatttttataccaagaacccaagggtactacattgctgtgctaatgcaacattaaaattactgtgggtcattaattcaaaacattgttagtgtctgctatatgcaaagaactgtaggatataagcaactgtaacaaaaaaggaagtatggcacaatactttgatgcatgaatcttgtactgtaacttttttttcatgtttattcattcttgtgtttcagtaagtagaaaatgcaatacaacttggaattgcaatatttgctggattcctggggccagtcagagatctaagttaaaattagagtcatacacttggtctttgaagatgcagtcatagtcgttgggctaacagaaggcatttcctgacaccatttatccattacctcactctagaaaacggcaagttgaaatgagatgggagaaatattagatacctcaaaaaagataaaagagacaggagacaggtccagtgtttgtcacttctggaaacagcagctgaggggtccggacggccctataagagcaaatctcgttcagttccttaaagtaaaatcaagacagcctcacacacacacaaaaaagggcatttttcttatgaccattactgccagagattgctttaaaccaaaaaaaacccatttcaacatttcgtaaatctaacatctaagaataaggctattcagcctatggtttaccacgttttagttcattttataagttgaaaatcagtgtgatgtgatagaaaggagagtggaaacctgcccctggtcccagctctgcctattggaaagttatcaggccgagatgagggcaattgtcctcattcctctcttcccctggaccacttttgtatcagaacaaaacaaagcaaaagtcatatgtttcttttctttactttcttttcttttcttttttttttttttcaggtagagtcttgctgtgtctcccaggctggagtgcagtggcatgatctgcctctggggctcaagcaattctcctacctcagcctcccaagtagctgggattataggtgcacaacaccacgcccagctaatttttatatttttagtagacacaggattttgcccaggctggtctcccctcccacttcggcctcccatcatgctgggattacaggtacgaaccactgtgcccagccgatcatctgtttctttacaagcccaggatttgtcagctgtttgttgaatcggatgcttcatctgaacacctaatctttgtttgtctcatcctccaaattcctctaggtatttttcatgaaagaacatctgtcttttggctgtaactttttattttttcaatctgcacttttttcttagaatgaagaaaactttcttgagaacgagaacacatcaggaaacaactcaataagaagcagagctgtgcaaagcagggagcacacaaacaccaaacaggtacagcaagactgtggtgcatgactctagtaccatggcagccgctgcgcaacaggcacctgagaacagtgggcacagaaagcatggcgccccactggcacgcagaggaacagattaagtggtaattaaagtgtgtgggggcatagtcgtaaagaaaacacacacgcccaaacaaagagattttgtttttatccacctgtcctcagagttccctgatgggaagcatcacttcactattaggagttccaagctccatctcaaggaaaaaggcattggcttagacaaaagcatctgagctttaacgtaaatgacagaaacaagaggaaccctctactatggttctgaatctgggtccatcatgcactcgcattccttagtagctttataccagtccgagggactcttgcttaatttcacttacatgttgaattctggacaggagtttatttaaagatggcttcctgttgccaaaaaggtgaacaaattacccatgtaggtcaccccttaaaaggtaattcagggccgggcacggtggcttatgcctgtaatcccagcactttgggaggctgaggtgggcggatcacttgaggtcaggagttcaagaccagcctggccaacatggtgaaaacccatctctactaaaaatacaaaaattagctgggcgtggtggcgtgtgcctgtaatcccagctactctggaggctgaggcaggagaatcacttgaacccaggaggtagaggttgcagtgagccgagatggcaccactgtactccagcctgggcgacagagcgagattctcaaaaaaaaaaaaaaaaaaggaatttggggtgcccactagtgtgtcattttgtgaggagttttctcgtggtaaaagaatcacttttttttaaagtagacaatttggaaaacttattgtagcaaaatttggaaaaccaaaaaaggcttataattcaagaaaaaaagtcagtgcctaacattttggaacacagccttttttaatgcaaacatacacccacatgcatatgtcatctgtattggaatcataccatgcatagtacagtgtttggtaactgtctattttgcttaattgattgtaaaaaatgttcactaagtattcttcaacaaacaaaaaagaaaacaatacttatgtccacataaaaacctacacatggatgtttagagcagctttatttgtaattgccaacacttggaagtaaccaaaatgtccttcagtaggtgaatgaataaataaactgtggtacattcagacatgcagtgtctttcagcgctaaaaagaaatgaactatcaagccatgaaaagacatgaaggagccttaaatgtacattactgggtaaaagaagccaatctaaaatggctacctattgtgcgatcccaactatacgacattctggaaaatgcaaaactatggagacagtaaatagtgctttcaaggcatcagggggtggtagggacaaataagaagtgtggggttttttgtttttttgagatggaatctcgctctgtcagcaggctggagtgcagtggcacaatctcagctcactgcagtctccacctcccgggttcaggtgattctcctgcctcagcctcccgtgtagttgggattaccggcacccgtcactgtgcccagctaatttttttttttgtatttttagtagagacggggtttcaccatgttggccaggatggtcttgatctcctgaccttgtgatccgcctgccttggcctcccaaagtgctgggattacaggcatgagtgaccacgcctggccataagaagatttttagggccatgaaactagtatgcctgatactacaatggtggatacatgccatcatacatgcgtccaaacccatagaatgtacaagaccaagagagtctcactgcagactttgggtgatggtgatgtgtccatgtaggctcctcagttgtaacaaatgtacttctctgggttcatttgatagtggggaaggtgagggtgggtagacaatacatgaaaaatctctatagtttcagctccattttgctgtgaacttaaaactgctcttttaaaaatatttttaaaatatttttttcataaaaacaaaaatttagatatttttcaattataaatgaggatatgaaggctgaggagtagctactggatttgatagcaatgggccttgggtgacattggcaggatgcattcagcagaagcacaatcacagtgggtagagaagtgggcagggtgtgaggaagtgacctccaaagagtaaacacaactctctccagcggcctggctgtgaaaggaaagagcggtgcagatgtcccatgattgtgggagtcaagggagatttgtagttgttgtttttaaaacatgagaaaagatggaaaaataagagccaacaatagtaatgttagatataccatagatagcaggtaacttggggtactttcactgcaagaaaataataatgatgaccatttaaatcaaatatttaccaaacattgactattggctaagctgggaattagatagaaataaataaataagactcaactccagcccttcctcagaagctgcagcttggactcagctggtctctcttacaattatcctcacaccttccttgttcctagggtccagcccagaaaatgaaggtaatctgaatcagaagaacaatggagtttggcctcgtggaattataggatttttgagaattctttcatctcagacacacactaatgatttatttctatgatttctgttaaagagaatcaaaggccacattggatatgacagaagacaagtgctgagatttgacattatacttcttagagcacactcaaactgctccacctccatctatttcctcccccaccagcttctgtaccattggttacaagagccaggcttattatttgagacattattggagactggagacaggtaggaaatcctctgccatcctggaaataggatgggtcatggatatttgagagctcaaactgtacctagaaagattgtccatgaaaaaatgggatgggtcagagatatcctacactcaattaattagagcaagggctagctgagtaagggaaatagtcccctttagcccaactgataaaaggatcctagttcccaaggggaggcttattggctcttgaaggtgccaagctagtgttcatattcacagaccaagccttgggctgccggggaaataaatccagctttggtctcagtcatttggaaaccggggctggcagagtactaggggagatttatgcagctcctggtattaacttcatttagtacttggctgaaaacagagatggggttggttgattacaagagagacaggagcaaaaagcacaaatatgagcctgttcccttaagaaaaggagaaaataccaacagctcctttggaaggaaaggaagagttcagtatgaacctggcattttttgtgtgagattataagccgggaaaaaaaatgtctgtgcagtagataataggagccatcttcttgcataataatttaaaaggacctattgaaagttctttgcccgagttctgagcaatgaaaccagggtccattatgcccaggatgctcattattccatctctgctccaatgtttgatttccaggatgaagaacaggtcacagttgagcaggattctccaagaaacagagaacacatggaggatgatgatgaggagatgcaacaaaaagggtacagtctttaaaacagggaaataaccaagcctacctcccgtttggttttattactttgttttatccccatttgatttctttttttttttttttttttttttttgagataagagtctcactttgtcacccaggctggagtgcagtgatgtgatctcggctcattgcaacctccgcctcccaagttcaagcgattctcccatttgagcctcccgagtagctgggactacaggcgcatgccaccacgcctggctaatttttgtatttttagtagaggctgggtttcaccatgttggccaggctggtctcgaactcctgacctcaaatgatccacccacctcgacctcccaaagtgttgggattacaagcatgagccatggcaccaggcctcccatttgatttttaacacttattataatttattagagattgtcaccacccatccatctaccctccctacccaacaccccttccagaaaaattaatgaagctttaagatgatcaatgtggccaattcaaactgctgatgttctgggaacccaatatgcagatttaaattcacccaggacagtcttctaattaaaagtgtaaattaccaaataattgctccagtccatacgaatgcagttaattcatcttctcaatgtcaatcaatagcaattgatcgctcaaaacccaatccactttaaatcccaacaaacggtttctcttaccttgtaatagcctcaaagtattccaagttcttacaactccgtaaggtaggagacgcaagattagtatctttattttttggaccagaaaaatgaacctcagagaagtgacttccccaagtcaactaggagaggaagagaattaggtcacaatttcagcttctgattcctagtccaggattgtctgccacctatcataacactacagtatttgtccatcttctatattcctacttaaatttgatttgcattcctatgtctctgaggaaatttttcttttttcttttttagaggcaggggcttactctgttgcataggctggagttcagtggtgctaattttaaatctagaaatagattttaaattttttttttgagatggagtcttgctctgttgcccaggctggagtgcagtggcacaatctcagctcactgaaacctccatctcccgggttcaagcaattatcctgcctcagcctcccgagtagctgggattacaggcatgcaccatcgtgcccggctaatttttgcatttttagtagagacagggtttcaccatgttggccaggctggtcttgaactcctgacctcaggtggtctgcttgcctcagcctcccaaagtgccaggattacaggtgtgagccaccacgcccggccagaaatatattttaatttaaatctattctgtccagcctgggcaacagagcaaggccctgtcatgagatctgtcaagctcactgcagcctcgacctcctgggctcaggtgatcctcccacctcagcctcgcaagtagctgggactacaggaggaactttgttatatgtatcagaagatatctctggagttggccagaattagggttggcagctcttgtcacatatacatcatcccaaatatttaccatatcagaaacatagcaaagttttatccttcattttactttatgagtctctgacccggaggtactgagaaattctcttgggtggtcagaggtactcaggtttcactaatgttaatgagactgaaacagccatcaggaggttgggaattattcagcctagataaccaaatgaccaaagtgtctactttcagctactctgctttatgcagaagtcagattgccacaatggactacacacattccctgcaattaaagaacctgatagagtcaacctacagtatgtgaatgtaccctattaaatgtcaccctctgctgctgctgcttcttaatatatcttcaactgagaataatacatcattagcctttcctaaatcagaccgtgaaaaaatgtcttcactacacttttattcacccaatattttctagagagcactgtttctaactctcagtatacatattcacacacatacataatgatgaacatttcatgaagtgatacctattgttcttatgtatgaatgatacactatgatacttttgatatttttattctttctttttgtttttgtttttgtttttttttttttttgagatggagtctcgctctgtctcccaggctggaatccaatggcgcaattttggctcactgcaacctccgcctcctagattcaagcgattctcctgccttagcctcccgagtagctgggattacaggcctgtgccaccacacccggctaatttttgtatttttagtagagacagggtttcaccatgttggccaggctggcctcaaattcctgacctcagttgatccacccgccttggcctcccaaagtgctgagattacaggcttgagccaccgcgcctggccttttttttttttttttggttgagacggggtgcagtgacacaattacagctcactgcagccttgaccgctcgggctcaagtgattttcccatgcagctgggaccacaggtttgtgccatcacacgaagcttttttttttttttttttttttttttgtagagacaaggtctcactgtgtttcccaggctggtctgaaactcctgggctcaaataatccttctactttggcctctcaaagtgctaggattacaggcatgagccaccacacctggcctccttctattttaatagtggttactatgtgggcttcataacccgctaatgcatccccaactcagagctgtaaaatactgtttcagataagcaatatttactcccatttcattcatctatcaatcaatacatgtctgttgaacatccttaatatccaacgttctactcatagtgctgtatggctcatagacatctgttctccagggtctctggccctgggggactgagaagttctcttgtgtggtcacaggcactcaggtttcactaaggttaatgggttgggaattattcagcctagataaccaaaagactggttattaaccaaataaccaatatttcctgctactggaatgggtcagtaatgggttcataacaaaacacaatcaaagaagacagtaagaataaagttcagaggcatgtatctgtctgagaaaatgcaagaagactttttagaagtcaaaagcttgagctgtgccccaaagcttgagaggaagctgacttggaggtgcaggcgagactgttggaaggcggggtagtggaggcactggccaaggggagtgcaggtctcccagcttggggccacatcctttgaggtcctggagtttgggaatcatctatacgggaggagaaatggtcatttttagaagtgctatcccgtggcctggaggggacaatggggaaatatgcaagaagttccttccacccagactcaagtgggagaaggagaggcctccaaagaaagaggcatcacacaggaacgagaagatccccaaagaaggagaggagagccatgtggctatgaccctggcctcccagctcactcctggggaactgctggacacgatcctcctccgaagacatgacccaacctacacattactcacacactacccacccagcccataacaaagccctggatggaaataaagacattccaacaactccagagctttctgagaaagctgtgacaacccattggttaatagccctaacatccaggaaatcctactttgcattttaagcacaccccatgaggtccatcagttttggactaacggggatggtgatgggggacagagcaccaccaacttgctcaaactttgccaaaccaagagggatgacagagttccttggctttttattttctaacaataaacacgtaataaacattggttaaaagctaacagaggatctcatagtgtgccagaaacactctcttcctgtgactatttcagctttggttagatatccatctcccctgctctgttcccaggagcatgttgtctgcacctctctaatccctcagggcttggcacacttattcaatgatggtgatcactgaatggtcatgatcatggctgactctagtctaaaatgaaatgagtttcccatttctattttgtaagacatacgcctcacacatgtgtttgtttgccttcttagtttacaaagcttaatctagcctcaccatgcagtttatttcatgtttttggtgtttacttctccctgcctttttgcttttatgttgcaggtgtttggaaaggaggtatgacacagtatgtggtttctgtaggaaacacaaaacaactcttcggcacatcatctggggcattttattagcaggtaaataacaaagatggttagggataccactgtctttttttttttttttttcagggattcccccaaatattaactttatgtggaaaaagattaaacctttattttctctgggacctcactgaatcatcgggggtggtagagaagtaaatcaagaagccctttataggggaagcctatgcaaattgtttccctaccccgtttatgaggccagaagctaattttgtttttctttgagatggagtctagctctgtcttccaggctggagtgcaatggcgccatctcagctcactgcaacctctgcctcccgggttcaagtgattctcctgcctcagcctcctgagtagctgggattacaggcacacgtcaccacacccggctaatttttgtatttttagtagagacagggtttcactgtgttggccgggctggtctcgaactcctgacctcaggtgatttgcccgccttggcctcccaaagtactgggattacaagcgtgatccactgtgccgggcccagcagctaatttttggactcacttactctcctcattcttatagcctttgttattgtcaggtggatttgaggaggtgtgttggtttacacaaatccagaaaacacaagtgattaatgctttatatgaatacaacatgagtagcctagggccatctagcccactcgcttgcctgaaggcaggacaagaatgtctcctgtttttactccctccaaaacaaagagctccttggctcactttatttgttttttgttttggtttgtttttgttttttttttttgttgtactgttattttttgtttttcttgaagctgagcacactgaacttggcccattttaaagaacactcctgtctataaaacgtaagcaccctgatccaaaccacagacattaatcccaggctgctgcacagccaaggtcagcagttttgctggtgctcagacagttggaatagggaacagtagggttggtgagctttctgagtactgggccagatagtattttaggcttttcagtatttcagacataaggtcaaaaccatgccattctgccactgtagtaacaaagcaaccataaacaatacataagtagacagacatggctgtattccaaaacaactttatttctagaacacacatacaaactgtcaactgaagaatcaatcacgaggttcaaacatttggaaaggaaagtcataaagggttgcagcctgcaaggtggccattctgacaagctgggaagcgtagtctccaacagaagccagaaacaagtactttgagggagggaagaataagacaggaatttatgctgaaaggattggctaagcataagtattcaataagctatagggggagtcatgaatatttatgaaaggagacacatgcacatgcacaattgagatttgtgcctctttatggagcatgtgtattaaaaaatagcagtgttaccatgacctgagggtggagttttcagccctgtgaagtcaaaaggtaaagcaaagaacacaaaaaccctcactgtgcatcctccaagactggccagaaccactccagagtcagcggtctcatatcaagaggaaatgccttgtaaaactggtgagctgtcacgtcaaaattctaaagaggcagggcacggtggctaatgcctataatcccagcacttttggaggccgaggtgggtggatcacctgaggtcaagagttcaagaccagcctaaccaacatggtgaaaccccgtctctactaaaaatacaaaattaaccgggcgtggtggcacatgcctgtaatcccaggtactcaggaggctaaggcaggagaatcacttgaacctgggaggtggaggttgcagtgagccgagatcgcaccattgcactttatcctgggcaacaagagcaaaactccatatcaaacaaacaaaaactctaaagagggagagggagtctggtcaccacctcagatgattggctaaaggcgatagagaaatgagtcttccatttcttgttttccagagctagtttctgctgactccttaggaaggaattctggttaaaggttaataaggaaggggcatactgaggcacatctgacctcccatcctgtcatggttgggaactcagtttttaaggtttttctgggatccccttggccaagacaggctcggttcagttggttgggtgacttaggactttatttttatttctcaaaacacacaaatataaacgttcttgccacctgcaaaaacaagtggcaggccagatttaacctgcagaacatctttgcagacctttaagaataggaaaccttattcttatcctagaatctgctcttcaaaagcagccagcttggtaattgcccctacctcttttccttagagactctgtgtcacttagagaagtagtctgttgttggtaggtctattccttcactcaaatttaggccaaatctgaactgcaaaccccaagaatcagtacctctttgccagtcgtcacttcaacactcggcctttctctgatagtagctcacctgccgagactgaatgccagtggtaaaaatggccagtacttagaggcccaatgattgagcatcaagattcaagaactcagaaggtcctgtaagaataaaaatacctagcaccctgtcctcctagcattcatggtggtaatttttgagacttgctttgaaaaatatcaaaagaccccatcaaagaagccagtagccatatcaagagcactcctgcattcagtgatatttaatgatattaaacctcccctcacctgcgccagaacaaggctggagcctggaggcgtgtcccagtggttagtgatgttcagtgtctgtttttgcttcctggacaggttatctggttatggtgatttcggcctgtgtgctgaactttcacagagcccttcctctttttgtgatcaccgtggctgccatcttctttgttgtctgggatcacctgatggccaaatacgaacatcgaattgatgagatgctgtctcctggcagaaggcttctaaacagccattggttctggctgaagtggtaaatgcaattggttctcttatttcagttaagagagatagtagtcctttccaacaccgtttcaaaaatttgttctgaaattgcttcctcatttatgggatatggaagctagaaacaccctaggaagtaatctgttacaatgtcttcattttacaaacaggaaatcaaagcctagatgaggcaatgactcatttgaaatgtatccaaatgtcctcacaaactgccttaatgtcaagtgtattaaatgataaaatgttgtccaaaagatgttgagcatattacgttccatgtgctatattaggaagagacacctccatgcctacgtattaggaagtagttagaaatataggatagagtgaaagttttgtcatagcaggatggctttcactctccctctgacctgtcagtgggagggcaccatgatcaatcagtaatgtctgtcctggcacaagatagggaacaacacaaatgccatctaatctcagtacctgtaaataaagaattgggttataagtacaaactgatggagattgctgattatgtgtctgtaaagagcttttatttttaccaactttttttcttacacaagttgtacccattctctttacaatttatttacaaaatgaggatcatagaacatgggaggctgagcactctttttcatgacccatggggctatggtcaaaataaaacttaatttttttcattcatcattcttccaattttattcaatgggagatatctaccctatattttataaaactgccaaaagcccatgacccttctgaacactcttagtaatagtccaatgtttacagccttttctttttttttttttttttttttttttgagacagagtcttgctctgtcacccagactggagtgcagtggcaccatcttggctcactgcaacctccgcctcctgggttcaaatgattctcgtgcctcagcctcccaaatagctcagcctcccatgtaccgccatacccagctaatttttttgtgtttttagtagagacgggtgtttcaccatattgctcaggctggtcttgaactcctggcctccagtgatcctcctgcctcagcctcccaaagtgctgggattataggtgtcagccactgtgcccagcctattttttaaatttttaattgttgtgggtatgtcgtaggtgtatatatatttacggggtatatgagatattttgatacaggcatcatggatattttttaacatcagaatatgctgtcccctacagtaatgagaactgtgaacatgacccagtgccctagttttcctccctagcctgggcctgagtgtcccctttctccttgttacttgctcccctgccagcctcaaagccaggatcagcctggctacctgctatggatatgaagctggccttcttgggaggaagggcctgtgaagtgttagagagaccctttcccataggaccctgtgtcctgcagcaactgctcagagcttttccttcagcctctctctgagggacctcctctcccttcaggtggccccctgagcaggacccaagaccagttctctccctcaagactaacgtgggatctaccaggaaaattcacacatccttggcctattaaactgggcttgtgcaatcccaacactgcaggctttctggctctgctgtgcaagccgtgagtcctgagtcagatttgtcatgcttgctgggctccccagaggagccagaacttgccctaacgtctgatctccctctcggccgctggtgaggtcccccaagggcagataacatattccaagttcttccttaaatggaagcaggtaacacctcacccatcccccaaaacaaaggtgaagaatcccagtagctctcttaaagaaatcaccagacattcctctccaaacatgctatctcctctctggcccctttgtgcatccttgaacaggtgaagggcccaagagttgtagagtaaggagacccagtacttaattttttagctatttgccttgatagccacaatcaaaaaaatctgttgcagtttctaaacgcacaacctactggtgccagagtatattcatcttgtttctatgtttctttgttaatttaagcctgatggctgggagtggtggctcgcacctgtaatcccagcactttgggaggccgaggcgggcaatcgcctgagctcaggagttcaagaccagcctggccaacatagtgaaaccccatctctactaaaaatacaaaaattagccaggggtggtggcagatgcctataatcccagctactggggaggctgaggcaggagaattgcttgaacccgggaagtggaggttgcagtgagccaagatcgctccattctactccagcctgggcaacagagcaagactccatctctcaaaaaaaaaaaaaattaagcctgattatgattctcaagttagcacaacaaatgatgccaatgcctcctttccccttctcttagggtgatctggagctccctggtcctagcagttattttctggttggcctttgacactgccaaattgggtcaacagcagctggtgtccttcggtgggctcataatgtacattgtcctgttatttctattttccaagtacccaaccagagtaagtatccagttgatcttttaggttcttttttctttttctccccatgtgtaaattgctcaaaatactgattgtgagagaatttaactattgttcagtacttttcttaccttgatgggattatttaacgtgaccagggtgccctatcttcctgaactttcatggtactgtttgttactatttcatgctccattctcagtaattttccagttacataaccagtgagacgttctctccctgtcaagtctaatttcttctcgcataccctccatcaaacacacagagaaaactcatccattttgatccagatttccccagaccagtaaaaaatctaatagtcctccattggatcctgcagttcatcgaagtcccatgcagtttgggcatttatactccaaaaatttgtccttatacaattttctttttaatattgaactcaactcttatcctagttctgtccactggtaacccgtgaaatgggcaagaattctgagacatcaaatctctcatatgtaactcaagatggcaaactctggaagactttaccattaaaagcaagacccaaggaaaaaaacacaaatcagagaccaagttcaactaatatgatccaagttctttgccctgctgaggggaacatctccattgtctatgcctccgatgccatagttcttttgaagccactcagccctgcaccacagatgaaagcaaatgatcgtccattcctgctgcacatcctgggtctgcatttgagtttattggtctcttttacaatgaaatgagagcctcttgacagggcaatattttacttaattcacttacaggttgtcagatcaacaaaccttggacgcacagagaaatcatgttctgcctttccattttccagataggggaaataattacatgtatccagtacttacagcttgactaggatggccagattctgccttctttaatggcccttcttagactactgtttctatccaagtaatttatcaggacataatggttacttaaatactttcctggactgaagacttgaaactcagttttagggagaaggaatgcaatgctgagtttgtttttgtttttttcttgagatggagtctcgctctgttgcccaggctggagtgaagtggcgcgatctcagctcactgcaatccttgcctcctgtgttcaagtgactctcctgcctcagcctcccgagtagctgggattacaggcattcaccaccacgcctggcttctttttgtatttttagtagagatggggttttgccatggtggccaggctggtctcaaactcctgagctcaggtgatctgcccattttggcctcccaaagtgctaggattacaggcatgagccactgcgcctggcctgagttttttaagttatggttctatcaaagggttctctgcttatgacagctgtagcctcccaaagaaggtgggtgacaggccacatctgatagtgtgttcaaggaaatagtgatccattagacattcatgccacggcctgcattaattttcctactaagacatatcacttgatctttctgtataggtttactggagacctgtcttatggggaatcgggctacagtttcttcttgggctcttgattctaaggactgaccctggatttatagcttttgattggttgggcagacaagttcaggtaagtttggttcaaaagaacactttgcttttatggtgcttttaacattggaggtaatcctcaagacgtgtcagaaatgggtttatctgtctgcatgagttgtctcaaattttaattctgcatcatgggttagacaaatagttttgcttatgttgaatatgttagtctgtctggtttgttaacactactgctgttctgtacctatgtcatcgttccctaatccattgcccacatcctcctccccaggaactatcatacttcttagatgtttccacagacagagaaacaggcttcctttgcatccagtgctaactaatgccacctacaagccatgtatggctcccaacacattgccacagttggctcattctgtagcattctagagtcagactgaatgtcagaaatgtcaggaaatttgtatccaggaatatttcaaaaatatgcttctacaccattcattggagggggcaaagctgagaacattaactttccaagtctatccaacacatttgctgggtccgtcctctgagagcctagcattcctgtgcactgtctaatttccagtcatgtggttggaatgaaatctctttttctttctttaactcagacttttctggagtacacagatgctggtgcttcatttgtctttggtgagaaatacaaagaccacttctttgcatttaaggtaaagtcaaaccttttttctatgtagtcgctgctatttcagcggcttctgtctttgtagatgttcagatagaacttaactgaccaaaaaccaggtatatacctactgcgctggtcagaggtgtgcaatacatcactgctcttttccactgacaatgttatctgaagttagtggactgcacgcattttaccttgttactatggagttaagggaaacatctagaggaagtcagaactattcaaatactagggaatggggcttgtagctttatctgagatacttaggaaaaatcaaaagggtaatagcaccttcggccttcagggaaaagaatattatgttcccagcaacaagtaggcatgtggcagtgaatggctgatgggtccaggatcagtgacagctctgtattcgaaagcccctcagtcccagtccttggggcagccggtcaaccacatcaacctctgttttagagccatccccgtgctaaacgtttctcatctctccttcagcatagcctttgcctaggcaggactaggggataggccttctcctaactaaagaaggaacattattttacaggggaaaggcagcttggccccatggctggccacagtcagttccttcttgaggctcccacatgccccaggaagcccatcctcctctgggaagtccctacaaacacttgtcaatgagtcagaaacatgcattcgggttttccttcagctttctttttttgtggtgtgttgttattcatacacttctaaattgttttctcacttagagactccaaatttacctccaaattaccccagcttcagttaggccaacttttaggctgaaaaaagattcagcctaaaacgttaaaccagcagtttagtggcaggctggagaagagaacctctgctgtttgtaagaagcctgcagtttatacagcatttcacttagcaccctcccccagcaacctctacctggcagtttagctggtttgatgttttagggctgagataactcagccatctctgaaaggccaaatgtttatagagtgagatagaaatatactcatatcatgaaacgaattcagaattggaaaaaataaagtcataaagaaggaataacttgctacccagactatacaggtgttttcaggccttccccctcccctcttccagggcagtggcccctattctttcctgccaatgcagaatcctctgctaacattccagagatgagcctctttaactccctcaagctttcaggaaggcactgcctacccattaaagccaataaaaggctcatcgtgagtgagctctgaatactggcacaaaatgtcttttaatatatattattaatggatttttttctaaattagatcctgtacaaattgtcctcggtcattctgtgcctctggtagcagctttctctggccagttagccggggaacagtagggagggggtacagtaggatgaggctgaggagggacccagcccacagctctttgtggtctatgcagggtagaaactgctctctgtggaaacattggctgcactgaaggcacccaaagagcatcaggaaaataggatctaggaaaatgcaatggttttttgtttgtttgttttgtttgtttgtttgtttgtttttgtgagatggactcttgctctgccatccaggctggagtgcaatggcacaatctcggctctgcaacttctgcctcccaggttcaagcaatcctcctgcctcagcctccccagtagttgggattacatgagtgtgccaccacgcctggctaatttttgtatttttagtagagacagggtttcgccatgttggccaggctggtctcaaactcctgacctcaggtgatccgcccgcctcagcatcccaaagtgctgggattacaggtgtgagccaccgagcccagctggaaaatacaatggcctttaacacagaactaaagtagcttccaaaatgcagtcactttttagtaatttgaaaatctataggtaaaatcactattattttaaaagctagaagaatgaatgtttactgcataaggtcatgacagacccctattgacttcagtagggggggcaccatgtttgagcggccaaagaaaagacctggagccagcaaatgagacatagggtttattgagggggactcacatgcagggcagtccagtggcagcaggctagagaggagaaccgctactgtttgtaaaaggcaggcagtttatatagcattctcacttagtaacctcccccagcaacctccacctcccaaccttcatttaacccaaaacaaagggcctggatcccccatatggcctgctttccacggaatgggccaagggttcagatattccttatagataaggaatgaatctttggaatggccgctcccaggttccttagtttggaactccaaacacacacgcttagaccatagggtcattctcaggacatgctgaagttattgctgtcaggtgtgtctgccatccagtaggaggcactatgtgtcagcacctaccatgccttacctgatctctacagctactcagaataaggctctgaggttgctcacaatttatctcaacttaggttactctgctaactagtggtgaagcccatgtctttttagcaccaggacaagaatattttctgacagccttcagtgtattgatctaggtattacaaatccccccaaacttcattccttctttgagcaaaaaaagctcaccatagaagacaggggaaaaaagtcaaagtcctgtgacaaattagaataaaagactgtagatagggaagctgcctgattaaagttcaagaggagtttcccatatttttatgatgtttcagagggagaaaaggagacagagaggaggcctgatataaaacctgctggtgcagctggacccatcattaatccatgtttgtttctgtccccacaggtcctgccgatcgtggttttcttcagcactgtgatgtccatgctgtactacctgggactgatgcagtggattattagaaaggtactggggctgggagggactgggttataggtgtagagctgattatctcaggcacgaagtcctcaaggccttttatgcaggtatttacgaagtgcctttctcttcctaccattatccaccatcaccacctaagtgattagattcaaaacctccaatcctaaatgtgtccatggagggaattttatctcaggagcttctaatagggttttgatttgcaaagcactggatatcttcatgaaactatagcagttacttctttagcggaggaattgaggtcagatactgctgggggaaatgatgttattccttcatcttggttaaccgccctgtgcttatctttttttcttttttaagctactccttaattgtatgctaccttgcttaaggaggttacaaaagtagacacttctggttttggaggtgctagagaaattgaagcaaaaaggagaaacagcttttcactcctgagggagtttcataagcatgagcgtgcatgcatacacacacacatacacacacacagctgaagagttcatgtccttcctgctgccctagcctcaatgagtcctatgttcatgtgttagatcagaggacaaggagctccgtcagctaatttggatgcaccacacacgagcacagagcagtgcaggcagtgcttggggcacagccccagccctccttgatcccaataaataaatcaaaatgtacaaaaaggaagagaagagagagagggaaccagaatacaggtagtagcagagttcagaatgacagcaagaactccagggcccataatttcctgtttaaaccccaaaacattcagaattgttatgctcttgtctaaactaaaaagcaaggagagagaatgcaacaggaagtcctcatccaccatctctagttgaaaggccagtacaaaagtggaaccaaaaaccacgttcatttcaattaagtaaaaaagaccaaacctcaaatacatcctgctacatatgggtgacctttgacaaaacaactaaactgttctgtgctttggtttcctctttaataaaatgagtataattacataggacctctctcaaagagttattgtaagaattaattgcattttctggactgtcaagggcttaacacagtgcctggaatgcagtaaagccttccataagcatgttagcaattgtcatttattacttgtatacaatagacctatagaaattgatttgtataatgttcaaagtatacgcaatgactcagacttactactccaataagaggatttgcttggcctgctctaggggctcaataagttaaacttacctttagctccatcattagcttgctgacaaatgttgaagccctcaatattttacaccagtttaaggattttaatccctactttgaagttttgggtatacaaaaagttctttgctgactttgtccctttcttccttttaggttggatggatcatgctagttactacgggatcatctcctattgaatctgtagttgcttctggcaatatatttgttggacaagtaagttgtaatatcaacagaacaaaacatctgttgaaatggatcgtctctttccaaaaagccaaataagaaaataacacaatgttcttttagtgtagagaaaatggtgtcaaaataagaaacccccagtattggcaatgtccggattccagggggagaagagagagagacagagagagagagagagagagacagagagagagacagagagacagagagacacagagagaaattccttttaacagtctgggtatggtatgtagaattgggttcttgagaatgtttatgaagaggatggaaggttgtcattttattaaggcatagacatagagcttctcatatagattctcaataaatctgaatttagtgattgtgaggtttctggtcaactcttcagaggctggtagctcttccacttgaatggatttcactatctcgaaatctccaagctacaaacagcctcccattctaaactataatgcctgtggcaatggaggagaccaagaaagcctttccaccaacaaccatgcaactgcgtaaatacttgagcttattctcaacttgtctgaactggccaatattctgtctttgctgagcctgaagaaaaatgcttttaggtttttctcttctcatcaaaaataagcttttagacttcaattttcacctccctgttccatcacatggagaaacgctcttttgcctgaagcccatttaagcaaataaatatcatgccaaggagtgtccctcaaaatagcagcatggctaaggggtggatcagtaagaaattgtaataagcccctcatcactccagatatgcagcttcaggcagaatggagtcacacgccacgaaaaccaggtatgaacgcttgccagcaccactgcccaaggaaactgaatttgaagcaaaaatcaagtcactcagaaaaacacatagccccaaatcccaggcttacaactgctcctggcaggctgaaacttcttgttggtaagccaacaagaagcacgggcctctactctaaagactatgcttacggctgggcgcagtggctcacgcctgtaatcccaacaccttgggaggccaaggcgggcagatcacctgaggtcgggagtttgagaccagcctgaccaacacggagaaaccccgtctctactaaaaacacaaaattagctgggcatggtggcgtatgcctggaatcccagctactcaggaggctgaggcaggagaattgcttgaacccaggaggtggaggttgcagtgagccgagatcatgccattgcactccagcctgggcaacaagagcaaaactctgtctcaaaaaagaaaaaaaacctatgcttactagcctggagcatagtctttagagtgggggcccatcccatgcttccttccctaggagttgaaattattataattacagtcataaaatctctcaggactaattagggcaccatcttgagttgattgctcctacctgtggggtaagagggctcccgcacagggttcctatttagtcggtaaatcgaggctccacacattcaatcttacagaacaattagagataataaggagaaaattgtaaaattgcacacaagcttctgtgatgttcaatttgatacttaatatgctaaaagtacagctattatctatggagagccccatgccgcaggctgcctgtcctccttaatgggattcaagcctttacaactacactctgtctgcttcttcctttccacccatcagagaggggtctctgattctcaattacagaagggcctgcgggcacctgttcttgttattgctgaggttgtttgtttgtttgtttgtttgtttgtttttaatgcttgtgtctatttctctgaggtcaggaaacaggtttagggtctgtcaaggtgaagttggaagacaggaagccacagtggcttagaaatcacccatccagaaggttaggccactgcatagagtcagttggcccttagaaaagtgcaccaagacatcacagagtccagtcctaggctgggtggaggccttctatgtctagcctcacgaattttacaaaatttatacatgaccacatatggaaactgatctagagttcaaataacccagacgtcgatggtgtgggttctcaaatttgagcatgcattggaatcacccggaaagcttgtgaaaatacagattggtagcccccacccttggagtttctaatttagtaaatcgaaataatttgcatttctaacgagtttccaggtgacgctgatggagctggtctgaggttcactcttagaaactgtctgctttaaagaataaaattgtgagtagattggcatgccttcccctgcccccacacagatttaaaaaggaatctggtcacccttctttgtctccagacggagtctccactgctggtccgaccatatttaccttacatcaccaagtctgaactccacgccatcatgaccgccgggttctctaccattgctggaagcgtgctaggtgcatacatttcttttggggtaagaatgttttggaattatgaaaacaccaacctcttctttctttattattgttatttcttttcttttccattgctggtggaaaaaggaggccaagagagtgtctttttttgccatatggcaaaagttggtcacagttgctttggcatttgaacatagggatcccaaggagtttcagggcttcatatacctgctgcctaaatgtgagttctatctgcagaataaaaacagaaaaatgcaatcatatgataaagttgctttggttgaaaatttaaatctgttaaaaaaaaaattattacatcagtcaaggtgatctggactgggagtcagtaaactatggcccatgggccaaatcccaattgctcctgtttttggaaatgaattattggaaagcaactacttctattcatttgtctctggcagctttcatgctacagagttgagtcgttgtgatccacaaagacaacaatatttattctctggccctttacagaaaaacttttctgacccctggtctagagcagtgattctcaaacctttctgcacgttagaatcacctgggagcttttaaattctctaatgcccaggtccatatctcagagtaattaaactacagttccttgggatgagacccagccatcaatattttttaaaactctcagattctaatgtacagccaagtttgagagttggcagtctgtagtataaggctagagaatgttataactggtgcgtgcaccccgacccatagagcttacaagccacacatagacacagtccccaatattgaaactgagtaacacagcccagtcactgtgtgactcaggagactaggatttcttacaaaataagtgggcttcattgtaggtcttcatccaggcctcggagtgccaattagtaggaagaggcaagaagaaaggagcaaaggacacctgtggagcagcttgagtggatcatctggggaatgccatccccactgtagaaatgctgcctcaaaaatgttctggggggaacaggaacagggagggaggtgttgatcctggaattctgaaaatatgtggaagagaatccagaaaccatgtgagggcaggtaggaaggggaacgagtggacctgcaataaagaaaacagaagtcgtgtacagattaaagggccaccagatcaatgaagattgtgtaaaggcaccaaggacctcaggagagcaaaaggaagatggagagaggagaatatacacatctgcacatgaatcatgagtcccttctccactccccatcccctccccatcccctatctaaaatgatgtaatgaggctgggcatggtggctcatgcctgtaatcccagcactttgagggaccaaggcaggcagatcacctgaggttgggagttcaagaccagcctggccaacatggttgaaaccccatctctactaaaagatacaaaaattagctaggtgtggtggtgggctcctgtaatcccagctactcaagaagctgaagcaggagaatcgcttgaccagggaggcggaggttgcagggagccaagatcgcaccactgcactcctgggtgacggagcaagactccatctcaaaaaaaaaaaagttgtaatgacatacatgctttaggggctctctgaacattcaaaagggcaacagagaggtagaggaatcttccttgaaagtttccacaacacaggattaattcttttctgaaacgatcagattttggttttatgcttctccccagggatgtggtcaattagcacaaatgtctcccttatccctcagcctctcaaggtgatgcccgcgacttggctcaatgagctagagtggctcttccagacctccaaagaaacattgtcttctggaatagaaacaacccctgccctgtttcttcccttgcggagctcttggacccttcctctgaacacaagaaaaaagctaatcccaggtttgccttctttcttctgaaattgcaggttccatcctcccacttgttaacagcgtcagttatgtcagcacctgcgtcattggctgctgctaaactcttttggcctgagacagaaaaacctaaaataaccctcaagaatgccatgaaaatggaaagtgggtaagtgtgacacattcacctaattaatgactacccaagccggggcgggggactccaggagtcaatgtacagcaaaaatttgataaccggaaagcacagtgaattacaatattaaagttagtccaaagactatttagacttcacagaaaaaagtcttattttatttcctttttttgagtcttgctcaaaaaagacttttttaaagttgctctgtcactcaagctggagtgcagtggtatgaacacagctcactgcagcctcaacatcccaggctcaagttatcctcccacctcagcctcttaagtagctgatactacaggcatgcaccaccactctcagctaattttttttagaaacagggtctcactatgttgcccaggctgatctccagctcctgggctcaagggctcctcctgcctcagcctcccaaagtgctgggacctggccaaaatcttgtttaatacttgacataaacctctctaaatacctaatgtcaatacatttccatatctgtttgttgtaaagatatttctttataaatatagcagagtgtttatggagccttggtttagacagaaagccataggatgaccatttctggaggttcctcctataagaaagctggttccttttcttttgctctgtgaaaaagaaaaaaaaacagagtggaaaagactaagggatttagggtgttcaagagtatttcattaaataacagaattcatcagcaaccaacatgtgtctgaaattcacccatacttgtatgtagataaagtcaaccatgagcgaaaaagcaagttaccaaagaatacagcgtaattccacttgtaaagttactcagtgtgcagacttgcacaatgttgtttttttgtttgtttgtttgtttgttttgacagggtctcactctgtcacccaggctgagctcaagtgatcctcccacctcagccccttgagtagctaggactacaggcacgcagcaccacacccagctaatttttgtactttttgtagcgacagtatttcaccatgttgtccagactggtctcaaactcctgggctcaagcaatctacctgcctcggcttcccaaagtgctgggattatagggtgtgagccactgcacccggacacacaatgtattttttagggaatacagacatgtaggaaaactgtatagaaaggggatgatgagtgaatttcaggaagacagatacctctgagattagaggggaggatgagatcaaagaagagtacacagggggattcaaagtgatggtggcactccatttttaaatgaggtgatggatttacaggcttccttggatcattggtttgttgttggttttgaatcattagcttttataccatttgtattttataactattctctggcagctacttgtaataaaaataatttttaaacttgtaattttttatcattttccaattttttattataaatgtccccaaatttaaaaagtaatgtaagttacccagagactctggaggctaagataagaggatcgcttaagcccagaagttcaagaccagcctgtgccatgtagcatgaccccgtctcttaaaaaaaaaaaaaaaaaaaaaaagccaagcatggtggcacacatgctattcaggaggctgaggaaggaggatcacttgggcccaggagttggaggctccaataagctatgatcacaccactttactccagcctgagacacagaacaagaccctatctctttaaaaacaagaacaaacatggttaaatactcatatgcccacttcatgatgtcatgggattcaggtgagtattttgagcaaggcaggggccttagagtttgtctcttatctaagctctgattatgctacttctgcaccaatggtgtccatcccctgacaactccttggtaattctggaattgctatttcttgataaagtgattcagggaatcttctagaagctgcaacacagggagcatcctcctccatctccctggtggccaacatcgctgtgaatctgattgccttcctggccctgctgtcttttatgaattcagccctgtcctggtttggaaacatgtttgactacccacagctgagttttgaggtataatcacatcacgcccctgccctctgttttgtttctgcctatctttgtttaaaaataaaataggtttgtaaacagcccaccctaacctcagtagactcttccacaccgtagaagcttctcatgcatcccccaacttcccacccaccttttctctgtctcctatccccctccttccccacaacgacagtcagtctctcctggccccttccccaagaatccagcttccttcaaatgaccgatttctagccctgattcctgatgggtaaagatgggcaagggaagaaggaatttctttgcctaaaggagacagaggggtcaggaacagtgttgtcactgaggaggcaaaactgaaagcaaatcactattctaatcaagtgtctacttttggtttctgtagctaatctgctcctacatcttcatgcccttttccttcatgatgggagtggaatggcaggacagctttatggttgccagactcataggttataagaccttcttcaatgaatttgtggcttatgagcacctctcaaaatggatccacttgaggaaagaaggtggacccaaatttgtaaacggtgtgcagcaatatatatcagtgagtaaatattttaatttctcagtacatttcttcatcacatacctgcattcgtctattacttatgcctctgtgtgtcaagcactatgccaggcacctgggatagattagagagcaaaacaacctaaaatccattgctcatggagcttataatgtacatagcacttcctaactttcagttatgttgaattagagtgtgcgtgtgtgtgtagacacagctaatcattgccactataatcatctacttttgaggactgtggacacagacccagagtcacatgagctgggactgcaatcaatcaaccaaaattttttgaatgccttttatgtgcaatgcgctgagtactgaggccatagcaagtcatggggcccctggcctcatagtctagtggctaacagtctagtgatcttaaagcactctccctttgaacttaatggattctgtgagctctgagaaactgtccaaaagtaacatgcctggacatcctcgagagttagtgtagcatcatcactgctctccacgtggatgagggagagaaaaggctcagagtctgtgatctgaaagccttgagacaagcacccataattatgtcaggacttcaggtcaatagcttgcaaggaggcattcacatctgcctggcctttggtgggatgaggaactcaggtgaggtcatgtttgtagttgagtttgcaactttcttccctggagaacagaattgtcacactggaaactcttaaggaaatgatgaacattcctgagcacccctagtactcattgaaacaatccatttggaattaatgttccaggcatgtatttggtttaaaaatgaaaggggaggaaaagcagcctgcctaaggttctgagtctgctcacccacaaacaacactaccatccttcccagcttcccaaagaacaagcctgcagatttactcccacatagcacatcaatataacagcccactcctggggagcactgatttatattttacagctggggcattttgacccaacacatctgacatgagcagggactctgtagatttccctgttctcgcatgttcattcttcaactaacctcccagtaaagcttggccaattatcctcattgtttagatgccaccaaaaccagtttgtttccctgccaaaagtaaacaataggctaaattaagtgaaatgttttctatccccaattgccagttgccaggagagaatcgttttgttaatgagcaaaccgggctctgcgttctggcagcacgaagcaattttgtggaaaggttattacgagggtagagacagaacagtagagctgattgagtttaggggtgagcccaaccaaaggcaggcacagagagaacatttggtaacaggagctcagtggcctctgctattgttgaatcatgatgggaaaggcattttgtttctccaaatttctaatttgcaatcaacaaaatgcagatgagtcccagcaatttttgctcacaacctagaagtggagaagggcatcccaacagtctcctggaaaaggtgccacagaacagaacgtaccatgtgggtccgtgaggcaaaaccccagtgatatccactgaattatgcccatgccaacctccatctgagataagagggagagtactatgcagcccccatgcccctagtatgagccccttattgcatcactttctctttcctaaagataatactttgcctgtttttattcatttgtttacatgtaacacataccatagtatagaattcaaaaggtccaaaaaaagataaaggaaaaagtaaggcatccttcttatttctctggacctcttctccctggaacgtatactcactgtttttaaccttgtcctttgcacttaataatgtgtctcaggtacctttccacatcagtgcctgtgacatagtattctattgtatagcacaccgtaattcatcttaaccagtcccatgctgataagcagttatctgttttttcactatcagagatagatagtgttaaaatgaccatcctgtacgtatggcatctttgcctgtgcagacacaaggagagctgtgaggtgtgttattaatatttttctagtacggtgcatctcttttcatcacatcatcttgcacatttgtgggcaaagtcaacctggaattatcccagactcctttttctcttctaaaacccatcatggccacatctgtgtatccccttctcagttatccctggaaaggggaaagaggagtttgaagctccttatgtcatctttctccccacaatctcttaataagcatgcctggttttgaagccagctgaactgaactaaatgaaaagcactagaataaaagtggggaacaaggacagcttttccaggaagggtagactgcatacctacttgaaatatttttttcctgtcagctatatgcgcgctgatggaaaatatcaacaaaggagagttctcagaaaccatgagagagaagaggggccttggaatcaacaaaaatcttaccatggccacttgagtcttgaatgagtgtagcattgctcggtttgttctttgaacaaaatcatagggttttgagaatattggaaaagtattgcttcagtcacgtgggtacctttgtcagactgggtgtgcctctggtgaacaacagagtacacggaatcttctgagcttcctatagtcagtcctcaaactgaggaaaaattgtctggcctaagcagcatctcttgagtcacagggccacgcccttgctttcacgaattcatcttccatcctctgactgccccgtgaaagggatgttccttctcctacctccaactgggcatcctaactttcccacggagtggtcagagttgtggtacacacaccatggccagactataaggaagctcctgtgatagctgagaatttcatttttactaacataattatttttaaattatatccttttcactgaattataatttatataccaacttaagggctcagttttgatgtcacctgtgtaaccacaactataatcgacatatagactatcatctctgtcacacctttaaaaaaaaaaaaggttttcctcatggccatttgtagtcaacaaccccactcccatccccatccgaagacctagtcccaggcaaccaatagccagtctttcactgtaaattatgtttgcatattctagaatttcttttatttttattattatttttgaaatggagtctcactctgtcgcccaggctgtagggcaacggtgcgatctcagctcactgcaacctctgcctcccgggttcaagtgattctcctgcctcagcctcccgagtagctgggattacaggcacacaccatcatgcctggctaatgttttttttgtttgttttttgtatttttagtagaggcagtgtttcaccatgttggccaggatggtcttgaactcctcacctcaagtgatctacccgcctcggcctcccaaagtgctgggattacaggcgtgagccaccgcacccagccctagaatttcatatacatgtgctcacttagcattcatgtttttgcatgtatttcctttttattgcaaagcagcatttcatttttatgggtatccacaattgtttatccatttgcctactgaatgacattcaagttgtttccagcatgaggctatttaataaagctgccatatatatttatgtacaatctttttgtggcatgtgtttttgtttctcctagaaaaattgctgggtcattcaggcagagcaagtaaacttaagaagaaacttccatactgtttcacaaacagactgtgtcattttacagtcccaccagcagtgtataaaacttctagtcacttcacatccttgtcaacactttgtattttttaattttagtggaggcatagtagtatctcattgtggctttattttgcatttccctggtgatcaatgatgttgaacatcttttcatgtacttttttgttatttgcatagcttttgtgaagtattcaaatctccatccatttttccttggctgttggtcatcttattgagttataacagttttttatatagtctgaataagtcctttttcaagtaaatgtaatgtgaatattttctgggaccaattttttatctccagcaactagtcctgtccctggcacactgtagcagatggccaggtcatatggaatattagaaggtattattgaccaggaagcagcatttgtagaagccaaggctaccaatcataagccctttgtagagagtcactgagtccacacagcccccttccatcttcccacaaaattcaagtggagatggtaaaagaggtctagggagtaatgggtatttgataccatggactgtgcatttatttgtcaatattgaatttatggtcaaaatgaagcccagttggatgtcagatttgttaagccagctcagattgtgtatacatatgtgtttatgcttgcttacagattcgttctgagataatcgccacttacgctctctgtggttttgccaatatcgggtccctaggaatcgtgatcggcggactcagtaagtgaaaagaacattcttcaacaacacagatgtgccatagacatacttggatccccattttgctctgtactgttatgtcagaaaaaacaaaggcctttgcaacagtcatgagtcctctggggtctatttttttaatctctagtctgcaatatagttttcccttgcacacccaaactgacctcaggaaaaattttctcaaacatacagatgcttctcccagcccaggggtgacctgtaggcttcaccttacatgccaatgccaataggtttatgatgggcacctggagaaggattctgagagccattggaagtccagtggaagaatgctgtgatttcttagtggtgtctgccacgggcatagaagtagatggtgacagttgagttgcacatcatctccttagtctatgcctcctgccactcttttgccttgccatgacctcaataaatagccctttggatgaaacttaggaggtttttcttctgtggagaatgagcctttgagccttttggcaaacaagcctcttcccttcttcccacagcagagaatttctctgtatgtggagtttattactaagttcttgaatcttgaatttcccagctaagttaaagaaaaaaaaaaaaaagtcagctgacctgagcccagcctcagaacaattttcagaggctaagagttttaatcagtacttcaacattgatctcacatccctccttccatgtttcccagcatccatggctccttccagaaagcgtgatatcgcctcgggggcagtgagagctctgattgcggggaccgtggcctgcttcatgacagcctgcatcgcaggtaccgcaccctgtcctttgtgtcccagtgcccacaggatgaatggcagctttcaggacaggcagtgcctccagcttgcatgtgcagcacacgctgccacagaaagctgagagttagagctgctcttaagcatactgtaaagttaaatgtgtgcagtgtggtggaggagctaagaacagaatgagggttcagtgacttccttaattaataaaataaatggggccgggtgcagtggcttacgcctgtaatcccagcacactgggaggccaaggcgggcgggtcacctgatgtcaggagtttgagaccagctgtcaggagtttgagaccagcctgaccaacgtggcgaaaccgcatctctactaaaaatacaaaaattagctgggtgcgtgcctgtaatcccagctacttgggaggctgaggcacttgaatcgcttgaacccgggaggcagaggttgcagtgagcagagatcatgccactacactctagcctgggcaaaagcgcaagactctgtctctaaataaataaatatataaatacataaataaaactaaaaaataataaataaatgggactctgttccacttctaggcatactctccagcactcctgtggacatcaactgccatcacgttttagagaatgccttcaactccactttccctggaaacacaaccaaggtgatagcttgttgccaaagtctgttgagcaggtattgtattcttgattataatttctttatactccattaataatcaatcaaatcacacctaaatatccacttacttttttttttttttttttgagacggagtcttgctctgtctcccaggctggagtgcagtggcgcaatctccgctcactcatcgacttaattttataactttatgactctatttaaaagtaagaacttatgcagtgattctaaccacctttcactctgacttttctcagataaggctagcaactataacactagctagtgctactcaagcatttaatatgcacccagctgtgtgttacgcactttgtatgaattagctcacttaaaccttgcaactactgtataagttgggcactatcttttttttttttttttcattccacaaaattaaggcttagggaagctatgtctactccagcaaaattagcacaagtacaagtgagatacaaaattcaggctgatcttcctgctaagcctatgcccttaactgctaccctctgctggctccccttcaaggggatccaggctgtccagacaacacgatgatcgtctatggtgaacaagaaactaccagtgacccatgccagccacccccaccctgtacagttttaatttgcaaaatcagtgttcccacacaaggtgccatccttaatgtgcaagtgttttataaggattgattctatcctatctttgcttgttatggaggaaatagggaaagttcttgaggacacccagaatttaggagccaaaacaaattccccagtgtctctgtcctttaatccaccctaaccagaatgtgagcaagaaaatcagcttcctgccctgaactatttttaatgtcattgtctgctcacctactgtttctgccatctatggctcatgtaactgtttctttccactttccaccagcactgttgccaagggtcctggtgaagtcatcccaggaggaaaccacagtctgtattctttgaagggctgctgcacattgttgaatccatcgacctttaactgcaatgggatctctaatacattttgaggtcagccacttctccagtggaactctgaagtacagatgctgaattttctgctttggaaagaaaaaaaaaagaagctattgtccacagattgatgcttccataatggaatcagctttaattgcaaggaatgaagaaaaacaagagtggaccttcaaagctacaacattttcctcctcccctccctccccaccagccccttccccaccaagaactgctatgatgtcccaaagtgaggtgttgttgattccagtctcaatgggattttctgactttaatgtttgcaaggcatttcaccagaatacagctataaacggccgctcccaacaactgggctctgactcacccacacccacttagtgtccactaagtagtccagggtgactcagtttaagcacatctcaggtgaggtcactctgcatataccttggcttacctgaaatagcctgaacttgaatctcacataagggaaaactagtcatcaatcaccaactcattgactaccctcaggaagtcctgcagaaatcaagagtccttgaggagaacacgtggatcataccaaaaccagggtttaaatccattctgcttaagagttctatcagtcagtttaaccataaattacgctacagaaacaaacaacccaaaaacctcagtggcttacagatttatttttcactcacatgtttgtaatgatccatcttggttgtaatccatattgcttcagcacccagtctaaaggagcagcctctaaggggggcatgttggtcttaagagggaaaagaaaggtgggaaccacatgatggctctttcatcttccgctaggaaatgataccctttacttccatgacattccattagccaaaacaagtcctgtgacaggcacgatgtcagtcaccacagttaaattatcctgtcatagggagggatagtgaatattttgcagaagtaatatgatacaccataagggtacataatatccatgtctcccttcaaggagccatcctgttgtaggccataacggtaggcctattcatctgcacatttggtaatgtattcctggtgacaaagcagctactcttcaatcaaaagccgtgtaagaagcagttgaggaaaaaaagtcctggttgagctctgaaaaccttgcgttgataatttcattgaccaggatggcatcagtatcaaacttgaagaatgggtgtcagtgtctaagaaaaagattccagagacaatggtggtgtgctctttaacgaaatgcccatcaccactgctcttaatagcatgaagaccacatgctgtgagaaaacacaaacatcaattaccaagtcaagaaacagacactgaatgtgaaaaaggttttgaaataccttaagtaatttattttgtttctatttttccttctgtttgtgtacaagagtaatttaaaagaaaaagctatgtgaaaatagttggggttttttgtgtgttttgttttttgtggtggtgaaggaggaggcctaatgtccagaggactgtttatccctgaagtatgatatactaaaatatttcttattatttgtatcaattttccttggagctcaatgtgcccttgcagtcttcagactttattttaggaaaatatatttgcatgttttccccccattctcaatgtttggtgtcctggttcatcataccccacagaatgttatgtttatgtatcataccattcctctgtggacatgcatttactttgtttacaggttttggtttgggggttctctttttcctactctggacagtgcatgtacatttactttgcatgctggtgcttttttttctatagcaatagtgtctgatagacatatgcaagtcacatgtaatttaagatctagtagccacgctaaaaaacaagtaaaattaattttaatatatttaactcaatacattggagatattatttcagtaagatatttttcattcttatgaaactaagtctgtctggtttgcatatctcagttgagacactaaagttttactgataatacttaatccatgtttagatttcataaaatctaaatttgcaaagtaaatttacatacccatgttggtctaaatgtgcttaaaagttttccaataactgaaatgagtatcagttttaaatttaaaaatttgttacttggttactccatatttcaggtattagtggctaccatattggtcagagcagattcataggatgatttcccaggtttgaagtgtgtgtatatttctggtattataagatgtcagactggtttttggagaaatatgttgtcttaatttttacctgctttgatatgacctttctgtgtgtacgtgtgacatttctttataaatgcaacatgttcacataggtcctacgttgattccttattaatgctgtgcatccttgaactgagaaagggggtgttattcctgagctatattataagaggatagtaaaggccaaggaccaggaaaatgagctggttaagcctcttgagcttgttacccccagaaacctcaccaataccctgtgaacgtcgtaagtggcccttctcccagtgaaacaacctaatggaggtttttggtgcatggtgatgtttttattcctctttagtagacatagaagctggaggctgcttgtcttccccagtttctccttcacccatgtacatatagtgggcaaagatggcatgcctatgtttttcagctgtttgagcccgctcactgttgacagattgttgctgttggtctgtgctccccaac

SEQ ID NO: 554 - DNA, 231674 bp, Homo sapiens
gctggtaactccttccccagagtctgattacctgctccgcgaggccgcggacacgtgcggagagccgactgacactcgcagccccctcgggaggcccgacgcgactgggcccctcaggtgaggagctgtgcgctcgggtgggtgggctgcggggtggggggtcccgggggagatctgggggattggccggggtccgaggcagaactgtgggtggggtaagtggagggtggcggggggtgggggggacctgtgtttccttggaatcggctttggttaaccccttacgaactgagacgggattggttatgggggccagttttggggagctagaggattctccttatctgatgagagggggagatcccagcctagggacacccgcgacaccgagatcctgcttccacgtatccgtacgcacacacacccacacggaacacgcctcatacagtttctccaaacggaactggaactctactcggacactcacataataattcacatttagggtttaaaatgcactgcctctagggactccatgctggagaatgtgcttgcatttccccctcgaaaactccctctccagctcgctgaggtgtgggtgtgggctccaccttcccctccacgagataaatgttaacgcaggcttcctgcgggcgtgttatacacagaaaagtgcacgcagccggccagtgcccaggcttggagccccgcgaagacgcacgtttgctgtagtttccaagtttacttttataatttaaaatattggagttaaacacacgccccgcagtgagcagccctggtccccgcagcgcgcccgtccgtgtgcatatgggcgcatctgcgtgtgcgcacacgcgggagtcgcggtccccggtgtggcctcttgtcgctgtgctggtggcgacccttgtggtgcttggcaggcttcgggagaggcgcatgaaggatttcattgagtgtgaagacagagagcagagacagaaagcagaaggaggcggctgcagcctttgtagtcgcggaggaatgcggaaatgttgaagcactatgtcaaactttttttgaaatggggtcaagtcacattcagccagcgtgggaaagcaacaacaacaacaaaaaaaagtggaggagagggggggaaaaggcattgctgctcccgtttctctccgccgaagccgaccgtctggggggcgagtggggggagagccagggcagtgcggggcccggcgggggcagcaggcgcagttccctgcgggggtgggacgtccccgacgcttccttcgctgcggagcccggggctagactcgagcgggagggggttggggggatgcaggacaggcgggttgggcggccggcggcggctccccggctacctgtgtggccctcgacctggctcagacccccgggcagtccctgggggctctttcctcggcttttaaggaaagttctgaatgtagtgagtgccagaagctctgctctcgccgcggtccgctccacccgctcatcgtgggggtcgcgccgtttgtttaattcctggcaaaaggcgagcgggccagcggttgcgaggcaggtaattccgaggtgccccgggaattccggacatgcggccgtcgtggtgaaagtcctgccgaggccgcggcggccctggaggagggaggccccctaggtcccagatagctgctgaatggggagggaaagttagggtaccctactctggcgctttgttgtgcagagggctccgggggcgtccggctgcagactggaccgggcctttagccggagggggaatggggcagccacctctgctacctacagcggggaggtcctgggaatgggaaaaggttcgcgagtccgggccccgaggacagagaccttctctctcacccctggaggcgcaggatttaaccccccaccccccaccctttgaaagggaggttgagttttgctcaggtcgaaatcagtttaaaacttaaggacgaggcgcgattatgctatccccttcctgaagttattctttaaggagacgacaagcgaaattgtggcgaacacccctttctcccacccttgggatcccgtgggggacggtgtctcccctcccccaggaccgctcgctcgcccacccccgataagccccaaccctccccgaccagatggctggtcttcccaaggtttccaccagggaggtcctcccagccggagagagaattccgtttccaaccgagactcctttaccccaaaaagaccatttgtgtatgcgagtcgtttttaaatgtctcctcgtagaaaaactgaaagtagaaagaaaggaagcaatttctgagcagatgtctgaccaccccttctcgcacactcccagcatcgggttacagggtcctgggagcccccacccacattctgcggccccacacggatggacccacagtccttccgctccagcttgtgcgcgacccctgaacgccctccggcacccctggaccccgtctccctgcacgtccgggcctcaggaggcggggagggtagcggcgcaacacaatgatatagggataaatattaagccgtgacattgacgtgcccggcgcctcccctcccccgcgctcccggcacactctgggctgctcggcacgccccctcccgttccactgcgtcccgcgccgctcgctcatccccgaggggcccctgcaacctctccgcgcgaagacggcttcagccctgcagggaaagaaaagtaacttcgcttttctcggaggaaccaggaaggattaagcggcttgggagagggcaggagcgcgcggagggtagcgatggaggcttcgtaaaggaggaggaggggagtctggaggaaccccgaggaaggcttctgggctgtctgattgcactttcttcttatcctcccgtctcctcctttaggtgcaatgattctggactgagacgcgcttgggcagaggctatgtaatcgtgtctgtgttgaggacttcgcttcgaggagggaagaggagggatcggctcgctcctccggcggcggcggcggcggcgactctgcaggcggagtttcgcggcggcggcaccagggttacgccagccccgcggggaggtctctccatccagcttctgcagcggcgaaagccccagcgcccgagcgcctgagccggcggggagcaagtaaagctagaccgatctccggggagccccggagtaggcgagcggcggccgccagctagttgagcgcaccccccgcccgccccagcggcgccgcggcgggcggcgtccaggcggcatggagaaggacggcctgtgccgcgctgaccagcagtacgaatgcgtggcggagatcggggagggcgcctatgggaaggtgttcaaggcccgcgacttgaagaacggaggccgtttcgtggcgttgaagcgcgtgcgggtgcagaccggcgaggagggcatgccgctctccaccatccgcgaggtggcggtgctgaggcacctggagaccttcgagcaccccaacgtggtcaggtgagccagggagctgcgccctcgccatctggggcctcgcgcgcgcggggagggccgagccgggaatcctcaggcccagaaaggtgcggggcagagggcgactggggaggtcctgcgcgacctgttggtcttacagagtgagagttaagttttgtcgacagagccgcgagccagagccggtgaccttgccagacagcgagccgaaagacaagtcaaaaaaacatgacctgagcaggcttccctgcagctgtgcaacttagaagcgttttctccctgcccaccctgaaggagggtctgggggaagtgggtgcgttttagggacaggataagccaacctgagacatgccccgctagcccccgcatatttttcgtggccatgccgttggggaatttttgaaagacagagtaggtgagactggagaatgaggatgccgtgtgataatcagtgggaactttatgggtggagccaagtgtaaatcaggttaacaagatgcagaaacatcataatatttttgccagtcatactctcagtttctctttattaaagttgcgtagtaagaatgactcctggtggtctaaggagtttgagtgctgatgcccaatctcaaacagcgtcataaaaatttcttccaaaactgttatccctgtgtctgttttactttatatctctgggcggacatactctttagactaattctccaaagggttaaatgtgagtccaagatgtggtatggttagatcataaatgttctgcccatgcttttcccagatggattgtgcgagtgggtggggagacagcagttcttactctctcctgtgtggtaaccagtattaaatgaaaatgtgtgacttaggataatggtgttttcttagtgatcctggaatttccccattgtgtggttgacattgtttggttgtgtcatccttttcttttttaaacagagatgcatagctttacattgaaaaggaatgcctagaaacttctgcaaattgggttgtgattttacctttctcgatcttgagaaaatgtgtagcagaaatatcttttttctcatccatttagggcttctgttcaacaaatacatgcctactgtgtgcgctgaggatgaaatgatgtaaataagcacagctaaatatttttgtaaaaagtcaaacaatttaacattagtcatcaaagtggagagacccaagactgacctttgaaataccaaactctctacagactcagagagaccaaatatctacagaatcttcttgggaggttttaacttgtctcctcttatcccaggctggtgatttgtgcggtgctttgttcccaacgcagtttagactcaagctagaaggcatcaaagaatcataaatatataaataaggcagtaaatggttataaagttaagaccgcattatacctcggcctagctagtgaaggagaatgagtgttttagaagatgagattatatataaaaacctatagatgactttttttcatgtgtattttatttgttaaaaacaacaaaatccgtttttggggctctttgtgatattggagggaaaaggggagggtatatttagccccctgtaactcagctgtcgtcctaggggaatcacctaatacatcccgaaggatgaattccaccactacaattttaagacggaagttcttgttttattttgtctgttacctatggagtatccagttaagggtgcttatcatgtatatgaatgaatagtgtccttccaaacgtagaggtactacagaggcacccctgtataacactattgtttacaaagcttacgccattcttataccagaggcacactttctgccattgtgcttgtagattttgtctgatccatcctattctcttgatttatcctcctgagattgatgtgtttctagacgtttctaactgacccatgacttggattctgtactgtgaatttcaggaggatattcttatgaactgaagacaaaggcattgttttctaaaattatttttacgtgttaaggtgatgatggcacctacctgttaaagtcgtgagaataaaatgagatggcgtatgtgaaagcactttgtaaatttgaaagtacttcagatatctaaaggattgtttgcgtttcagcagattgatggtctcttgccatggagcagcttcacagggaggggtcaattcacctgaccttttttgtagaacaaatcatattcaaacccagacattacaggctctggaaccaagaagatccttgaggataattagcctgtaagatgtcagaaaagactctcagtcacgagccatgaaattcagtgatacttgaggaaattattgatgatgtcaccctcatgagctacagatcttcattccctttttgtttccttcctgtttcttctcttctgcctctgccttgaaacaaccattggtccccatgacttgcttggccagactaagaattctggattttagaggctgcgaatatttgctcagacagggtcaggaaataaggacagttgacagcaattcttttctttccaagggagagttgtcaaagttgggtccccaaacctgtgatttactattgcccctgggattagttttacagtcttaagcctggttctttaatggtttcttaaaagggcagatgcttttataagtaccttcaagtcataagtaattgatcataattataggccctcccccacagatagttaagcctctaagctaacaggagcataataaacatattagttttttcaaaagtttaagatttaattttgatggatttgccagaaaagctgacttgttattgctggcactggtactgcctgcatgcacagggataatgacttgaaattcttgcttacctgcatttgatgtatcccaggccctcgcctgatcagccagtgagtgtctgggaagtaaatttactctttttttacatttggtaatcccaaatcctggaacctttgccagaataggacttcactgtgaacctgtattggagtttctgcactgcacaaatggatcctgtttgaacagcctgaactaaaaacaatagagataaaattatagcatgttttgtcagcagtctgttcattcaccaaatatttactgagggtccactatgtgccagactcttctagaaggtggggatatagcaatgaacaagcctggaaaagtctccgcacttgtagaacttgccttgtaatgagatgagcagttctttcttctctttaaaaatttactcatctttgttttaattgccttgttttgttatacttaacctaaccagttttatagaacaactgatatttctgataattcggttaccaggaatttcctgattgagtaggcaacataaccaaaaggctaatcagaatcaagtgctttttgaagattaaattttacctccctaacatagggattgatctatatgagatactgacacatagctaatataagtgaacatttgagctccatttattcaaaaaggatttaggaagggcatatgctttaaaaaccatggggctaggtgctgggaaagataccagggtaaatcatacctagctactctcctgaagcagttcttcccatgtttgaaggaataagatgatcaccataaccctgatacatgataggatcatgtgctgtaagaaagatacaagccagtgcttacctgtattgtttctagggattatatttattagtgtaacagtaaaagcaattcaaattcaagtattggctctggaaactaaaagtcattacatatcagtgaataaacttgtgatgtttaaatattataattagaatagtcactgctttaaaaacaaaacaaaaaacccaaagaaaaggctgtaaagcttaatgattattcaaggagagttttctaattttctctcttttttaaagatcttagtaatatattgcataaaaggtgagtaaaaatgtgattttctctggaaaacctaattgttaacagggtaaaagaaacatgacatatttgactctgtaaagccaggtcttcaattggattagttcatgagaatccttctgaataaaattgctatttgtgtggttgaataatacatttactagggcttttttcaataaaagcaggaaaagcaggagtttaattctccttttaaatatcagtatgttaaaagtatgtttgttctttctgtctctgagagttccttgaaaagtttctgatttttcaaggttgtttagtaaataaacattttcacaatggtattctgctcattttttgttcctacagaagaacttgataatgctgaatttttgacattgcagttatatcccttttatacaaccactatcaacatagaattattagaatctctctatggaatcaaggacaaaaaaggtctataagaggaaaacttgtataaacttgaatatctttgaggatattttcctatgtttaagacatgggtaaatgaatatctatgcaaataggttcctattaaaaataaattatttcttttttaaaaaaacaaatgtctcactattaatgatttcttaggaaagttttttaagaaggaaacacagcatacatgcagcctatcattgtaaaaccatggatattagggttggaagacactctggaggtcaagctacttgtctgtcatgccattttaaagttattgacttgttcttaaaactaagtagcaatttttgtttgtttgtttgatggaagcagttaaatcgggtgagtacatttctagtttggaaaaaatgaactgtatgtagacaaaagtgacagtttgccaggaatgaatgacataacgataaatgaataaaaattcagtaaattcctgaattctgcagtatgccatactgaagtatatctctacaagagtattattccagtaaattcttcttttaaggaagttgtgctataattatgataatttaaattaattataataatttaaaatagctatagttaaatgatgatacaggtaaattatgcaggtaattcattaataatattgaattcattttagacaaagaggagtaggaaaaattgaaacacttagtacttgtctgatgaatgaaatattacataatgtggctctggcacattatgtaacattctggttaatgaaataaaaacatcataatacttaaaaattagatggcataataaccatcagacacataagcaaatatgtgttttccatgccttctgaggaactaatcacactattgttctttctcatgaggttcagatgagttgctctgtcttcataggaagtaaattaattgtgagcttcttgatgtaacagaacacagcagagatgaaatctgggtgtcagtgaattgttaacaggagaagttagtgtgtatgatgttgggctttgtccaagatccaggaggcagcactgaaaacgcaccggtggttgataacaagcatacttacatgaaggtcactatttgagtgatgatccatagatgctaggtttggtggagcaggcaggccagcaatcagagagatttttccaagagctgctgggtagttttcttgaatatcaccagtttgctgccatacctgatttttattttaccagctgcacatgtagctgctcttgcctgagaggtgaaccggagggactgcaaggcatgtggcaggaatctatgcaagtgtacagttgtagtctggaagtccatttgagtcaggattattattaaacatttttgaccatctcctttgtctatagtagtttgccgaaatttggatatctactggctttgtaatttaagtagccacttaaattattcctattctctggccttcctaaaggatttagttcagtagaattagaatcacagcataaggatttttttaattggaagaagtcttagatttaacctagtgcaaccccctttgatctgttttataataataaaatttgagttgttttatgaatgcaaaaaattatctcactgttagtgaacagttttattctgtgattgtatgcattgtagatataaactgattgaggatggctaagattcagacagaggtttatattaaacattggtaagacaggatgactgatggtcattggatataccagaaaaaaatcccttgagatgtaaaagtattttcagtttagtgactttatgtttgctgacttgagaaccaggattgtgtattttatatccataaataacatggtgtccataaccattggttaacccgtatatgtttcctgattgattgaaattttaaaccccttagataagcacttttcatcgttttagagttgtatactgcattagcaagtatcttggactattgacattgggagatctgtgggtattaactgtaaggcatacacatgtgaagtctatttagtaagagtcttcaaatacttactcatatttaaacttttcctgactatgcattttttatcttcaatattgtacttgctttggctttgacaggatattctcatgttcttcctctgtatttgttaacatgtatcctacagacagatggactactccatttgccctaatggatttcttgccatccacctctattactttaatttgaacagatctctgaatgtgcacttggtacctctcctgcaccactctccacctgttgaaattctgcttatccttcagggccaacctcaaatgtcactttctttgttctgtattccttaatacctcgatttggataacatttctgcttcctttgagtcctggtaactttggacctcctttatggcacttagcttgtatctgtccccttatattatttctgttatgtaagatggaatgttaactcccatgacagccctcttctgactctctactctttcacaccctatttgtaagctctttaaggcagagagtgtcttgtgattacattcgtttatatcctgtatccattggatataaggtgaatacgtaacaagtgagtgaaatcattgaaaaggggtccagttataaaggaagacaccatatgaattatttctatcatgtgaaataatgttaatactaaggagtgtcaaggagggagaacggatctgcatattggattacacttattgggattcctgggaaataatttaggaaatactgaaaaaaggaagtttcatttttgtcttactccaatctacatagtttatatgaaagtttaagtataattcattcttatagttaactgtgcaactttggacttaatttatatactgcaaagaagacattaacattaggaaatgagcatacattcagcaaaagctgaaaatgatttgaacatttcaaatgtaagaaagtaaggtattataaatacattttgatcaattgcttgagttcttttatttttcccattaattttaatttctttggctttcaatagtggaaaacctgttagcagaattaggtaaaaccttcctaataatttctataaaagatgatgattctgaatttcatttgagccttgtcttctactcctcttcataatttgtgtacagagaatttggattccatcttgacaaactggtaggtttaattaagaagtatacttccagtttgaattcattccagtttcttaagacacatatggttggggtgtgtgtgtgtgtgtgtgtgtgtgcacgcatgtgcatgcagaacagtggagtacaagattcttgaaagaagggactgtgttgtcttgttccttgcagtatcccaagcatttagcatgatgtctggtgtcttgtaaccctgaataagtatttctaaatgacagaatatgcgccatttagaaattcagaatttaattttttttagttagaaatgagtaatcatgtctgaaaatacaggtgaggtctctggcattcagcaagtatttatgagtatctgttatattcaacgctttgttaaatgggattaaggcagtagtcacaaaaagtgcatattgaaatgtttacccaaaaaatggtatgtggtctgcaatttgtttcacaatggggtagagatgcaataagaatgaactatgagttgatcactgttgaaactgtggagttttattgtactagtctctctgcatttatatatgtttgaaattttccataataagtttttcaaatgttcctgcttgtgggctaggagtcagaaaactgattcttatcctgattcctctgcttattatttaatagttgagtaacctagggtaaattcctcatgtctcttggctgccatatccccacaataaaaatagaaattactactgctctttagaccttagtggtttactctgatcaaatgaaattatgtatacaaagatccaatattatacaaatataaggtattattaacaaaatgaattcctgctttcaagtagtttataatttcctggaagaaactgacatgtacacagatatctgtattactgattggtagcactttcattccacctcacgttgtgaaagtatgaatggagctaggtacttctgaaaagatgtgtattgagtttatagtaattaaagtaaaaaataatctttcatttgggtattggatattggtgtcgtgtttacccagtggtctttcctgtttattaatgggtttattgtgagagtatctgtggaccaaatgctgctgagaacacattgtcaaaactgatgggagcttgatgatttcttctgtatttgactattcaaattaacccaaagaggagttggattctttgcttgttctttctttcttttattttttaatttcaaaatctcaaagagaattattcatttttgtcatactttggaatttctgcttgtttattttctgaggctgttcctatggcgtgactgacttatgacatttaaaattttgttctgtgtcctctgtttaaatcgttaagagttctattcacagcaatgaagcagttcttttttaggggcactaatctttagtgaatttgctttttttttttcctttgcttccttttattgcaaagtaatctcataatttctgtggtaggtgttcctaatgattaaaaaaaaacattcatttatcctaaaatacttttatttttagaaggttcaaagtataatgttaggaacattaactctcacacctttccagcagcagagcaagaaaaacaaaagaaggccaggcacagtggctcacacctgtaattctagcactttggaaggctaggatgggaagattgcttgagcctagaagttagagaccagactgggcaacatagggagaccctgtctctacaaataataaaaactttttctgaaaaaagacatctttgcatttcaagggtagacttttaaactttagtttaaaagtttagtttactcagaccagtacattttaaaactttttagaagaacccaagagactgtctgagtcgtttcaagttgggagttttagctgatatagtatacatttcaaccatgtagaatcactttaaaaagttattaaataatcttgggttaaaatgggatattttcttgttgaaccttgagaaaccaagagacaggtttggagattggggctagaagggactcccagtgctgatcatgaatgaaatacattcaaattatgtaagttcccttgacctgggagaacatagcttctttgaaatgacttttttttttttttttttttttttttttacatattaagactcaaaagaagagtggtaacattctgctaattcttacaaattattttaagcccatgaaacttaatcagtggctatttaacttctagctgattagatgagaactgatgccacttggttctcagctaaagttttgtgaagggaagaagtctgtttcacagacattactactcaagtattgactgactcaaagtgatggaactgatttcaaggagagctgtatgaatgtgactgactcggtggtaccaatccaatcctagaaaaactagacttttgagatgagtcaagagaaacatctttgtttaggaaagatggtataggtttggtttttttttttttcactttagttgataaaagtaagaggtgaatccatcattaggcaaatagaaaatggtctggagttgtatttatgtatctgaaaggacaacatgctcattaaaagaagggaagacggtggtagaagataagctaagttaaggtagcaatgagagagaaaatagaaaaaacagtaagagaacttgggatagtgagtagatctgaagtttcttgataaacttcaaactctgaaacctggtgatctgaaagtagatgaaaattctgccatatttagaaaaccctcaaaccagtgcttatggaacgagtaaactcagattatcattcttacaattctgcaaaaataaaatggcattgctgtctgctttttcttgggcaccttattttaatcatttttgcattgccccgtgtgcctagcactcaattacctgttgaatagttgtatgaattaatgttgaatgtcagcttcccattagaatataggctccctgagggcaaaaatttttgttttgctcacgcattatctccagcatccagaacagttcctagtaaatatcaattgagtaaatgactgagtgaataaatagttaagccatgactcaagattactgttttcacagcaactttattgacagtaaaaatgtaaattaacactacaatttattagatattttatttttctattcactcagtattgcatttaaaactcttcaaaattatgtagtctctaataggtagtaaattggattctgacctgggaattaggagttatttaataatgtaatgattggcaagtagattggacaatgagatataccctttctaagctaattcatccactactgttttcattaaattacgaacataattttatgccaataatattgatattttagtgatattttaaatcatcatatcagtttttgcagattgaatttacatgttttgatggaagtttgtgaacatggtttaagattctctgggctgtgactgctcatttttgttttactgtaaaattagttatattaaaatatgacttctaaagagtcatattttatatttccctaaagagccttatattaatggccatagctgtccttacaagtagggatgtccatgtaatatgtatgtcatattaaaatattgacatgcattcccctaaagagccttgtataaatggctatcactgcctttataagcagtgaagcccaagtggccagtcccattatgaaccttgtcccattacttctgtttggggctaccattccaagcaccttcctcctctgcttagaacagctgattgtgatcacgtaatgggttgtgacatcactgataatactaatatattattacatagcaataaactaattatatatataacataatttatacaatatatatagtaatgaaagaattaaggaaaagaaagggaaagaaggaatgaagagagggagtgagtaatagaatagaaaagaaaaaaaattgtggtgttcccagtcagttgtcagatatgtttcaaggaagttgttaataaagtagagtaccaaagtttgcaggtgaggagagttatttgcagttttttgtttaaaataattacatttttctattaaagcaatttttctggttaatattgcttgtagtaaattactccaacatgtaggggcttaaaacaaccattatcttatattcatgaatttagcaggtggggaattcagacagagcacagtgagaatggcatatctctgttccaagatgtctgggacattagctggaaattactcaaaaactggtagtttgattattctaggcgtcttcactttcaagcctggtggttcatgcaagttggttggcgaaggctgggatctgaactcaggtttttgagcagagcacctacactgacctacaccaggtggcctgggcttccctttcagcatcaaagcttcagaatagttgaatgtacatgttggctcatggctttaaaagttggtgtccctgagaacaagcagtgttaattatgccacgttttgttgtttatatttgagttcaaagccccagagattcaagaggtagagacatacaccacctcttaatggaaggaatgttaaagaatttccacccccccacccccagcttttttgtaatcatgacattaatactaatactaaatagtatgaaagggcttatgataaaaaggcaaagctcctgccccagttctcagatacagctattcctattcccagtactcagatacagcttcttttcactgtctgtttttggtgcttctgtttatggtctccataaatttagataatatgctgttgctctagttcttgatatttaaacttcagtaatatctattgactttctactctgaaaaatgaggacttaccttgttaatattactgtgtatttccttcgctttctgtgagatagggatatttttatttcatataataattttaaataatatccctaaacttcaatttttcatactttcactttgggcagtatctcttgattctccatttagtaagaggagaatattttatccccgtaacctttcttccacttatgttctccctttaacatcacaatttctatcagctactttgctaaaattgtttatttgcattctgttccgtactgcaacagaggcttccctgcttttctaaaggttgacccttgcaagttgaacactggtaaacagtgcttacattcttctgactatatagagagagttcagtgctaggccaaatattcagcccttatgtttccttctctccaggttcaacattataaccctatgaagctgatggagtccttcttttgtaaaaacagacatctggattctctttccttattctgcatcacttgtttaaaatatgccctattttcgtgtactttttattcaggccatgactttcttgtatcattttgtttttcctggagtttctaattgcctttttattttttcttgccatgtttgcctttatcacaatctgtgttctccagaaatactatgtgtctacatatggtgggtttcccgccaccatttaatttgctgggcattctgtggaatctttctaagtgcagatttgcttcgttttattttttttaatggctgcttcttcatcatttgttctattctctttacaaggttcttctgttagtcagatatttgatcttgcagttgggatctctgtgtctcttcttttaatcttttttctaattcatctcttttctctggtttttgctttgtattctaaagaaacttctatattattttccaaatgtctactgaatttactctcagtaattaatatttttaacttcaaaacatcattttttgttctccacttgttggtttttaaagcatcctcctctggttttctgtaatatttctttgaattactgtgaatttttttaaagtcctccacattatctctgtttctgtcagtgtttagtttttttggttaacttttttgtttttcctgtggctgaattttttaaatgcctggtgatctttgaatatcctttggcttttttaaagtcaaaacgagctaaaggtataatttttatacagtaaaatacacccattttaagtgtgtgctttttatgagtttcgacaaatttattcacctactaaccaccaccacaatcaatatctaaaatactcgcattatcccacagggccctttgcagtgaatctcctccctctaccaggacccctgccaacctaatcttctttctgtcattatagatttgtcctttctagagtttcatatacacagtatcaaagagtattatgttctattatatctggctttcattgatagtgtttttgagattcatttatgttgttgactgtttgagtagttcattttccattatatggatttaccacaatttgtttattcattcacctgctgatgatcatttctgttgtttccagtttagggctgttataaataaggctgttgtgaatatttgtgtacaggtctttgtattgatatgacatatgcttcatttgtatggtaaatacctacaggtagattgctgactggtatggcaattgtgtatttaatttttaagaaattgtcaaacttctccaaactggttgttccatttccagtgctagtgtataaaggttccatttgatttgcaccctcctgaacacttgggactgtcaatctttttatttttagtcattctatagtgagtgtgaactaataacacattgtgattttaatttgcatttacttgatgactaatgttgttgaatatcttttcatttggctattgaccattctgataccttctgttgggaagtttctgttcaaattgaccgttttttaaaattgagttatcttattgtattgtaagagttcttgagcagtcttttgtcagctacatggattacaaatattttcttcaggtctttggcttaccttttcatttccttaatgctttatgtcaaacagaatattttaatttaacctaagtccaattcatctttttttttctttgatagcttatgcttttttgtatcctatctaataaatatttgtttacctccagggcatataggatttttcctatgttttcttctagaattttatagtttttgcttttattttagatttgtgatgcattcaagtcaagtctttgtgtttggcttgagctaagagttcaggttcatttttcctgtatggatatccagctatttccgcaccatttattgaaaatactttgctttcttcattttgaattaccttggcagctttgctaaacattagttgagcatatacatttgggcctgtttttagactctttgttcttttgcattgatctatatatctatccttttgccaatgtcatactttgattactataatgtataggtcttaatcaggtagtatacattttccagctttgttcttgtttttcaaaattgttgttgctcttcttttgtattttcatataaattttagagtcagcttgttagttaacacaaaaattctcctattgggatagcatttaatctctattaattagggcgaaggcatagatattgacactgacttctgatcacgaacatggtgtatctcttcatttatttaggtctttaatttctctcatcagagttttgtagcttttagtgtaatgcccttgcttgcattttattaaatttatctctttgcatttaatgtttttggatgttattgtaaaaggcattgttttttctttttaagtgtttgtcattgagagctatagtcttttttgtatagtgaccttgtgtcttgtgatctgaaaaactcccttattagtctggtagcttctttgtaaattttagtttttttacatacacagacacatcatctgagaatagacagttgtactttcccccctatatatatatatgtcttttatttcttttcctttctttttttgccctggctagaacctctagaaaaatgtcaaataaaagtggtgagagcagatgtttttggcttgttcccaataataaggagaaaactattcagacttttgccctaaagtatgatgttagctgtaagttttcctaggtgtcctttatcagattgatgaagttcccttatattcctagtttgcttagagagtttttcatgattgggtactgaattttgtcagtgttttttctgaagaattgaattgattatttttttaaaaactctgttattgtgctgtgaattatactgattgaattttgaaagttaaaccaagctcacattcctgggataaaccctacttggtcatgatgtagcctttttatatattgctaaaattttgttaagaatattcatgaatgatattggcctataattttttttataataactctgatttttgttctgaggtaatgctggcttcataaaacgagttgagaagtgtttcttcctcttctattttctgaaagattttgtgtaggattggcattctttctttcttaaacatttaacagaatttactaatgaagtcatctgggcctagcatttatttttgagtaggttattaactacaaattatattttcttaatagatatgagaccttataggttagatcaccttttataattttgtatttttcaagggatttgtctatcctagggtttttttgggggggtggtagtttattggtatagattctttaactccttatcttttttaatgtctgtagaatatgtagtgatgtccactcttttattcctgatattggtaatttgcattttcctctttttatcttgacatacagatagagttttgtcagttttattgatgataatccagttttttgtttcattaattttcacttctgtttgtctgtggtctcttgatacttattttgtttttatcttcttttcctacttacattgggtttaatttgttcttagttttagcttcttaaaatagaagcttggatcttcaaatatatgcatcttcccacaaatttgaatatgttgtggcttaattttcattcaatttgggttattttaagccatttttagttatatattctttaatccatggattcttaaatttccaaacatgtaagggatttttctaatttctttctgtctaattctgttgtgatcagagaacaattctgtatgattctaatactttttaaagatagtaacacttgctttggtccaacatatagcttatcttggtacttgttccatttgattttttatttatatatttccaattttctcctcactgtgtccatgttttcctttaaggccttgggcatttttgtagtgtttataatagtttatttaatttctttgtctgctattccataagttctgtcatttctgagtctatttctattgactgatttttctcctgcttatgggtcatgttctgtatggctgcatgtctaataatgtgttattggatgccaaacattgtgactatgacattgtcaactgctggattttgttctactcctttaaagagaattggattttgttctggcaggcagtaaagttatgtgtggttcagttttatacttccaaggcttatttttagtttgtctcttttgttgttggggagaggatctagtgtatgtaggctttgcttccaggctagtttagccctactaagacattactcttttgtagtctctcttctttggctggtaaggagtttgaaacattttctgccctctgtgagctctggaatcattcatcttacaactccttggtgatcttttctcagaagctgacctttcttgacttcatgcagttccacatgtgtagcttaatattcagccagggactcaatagaccccatgtagatttctggagctcttcttcagtattgtgtcttccaaattttagccactttggcctccttgtcttctcaactctgatctctgcctacccagctgggcaagactacagaatttacagaactctgaggttcctccttcctgtacctgtggtctggaaattgcctccaaacagaaagctagggcaatctagggctcacctcatttgcttcccctctctcagggatcacagtcctctactacctatagtccaatatctgaaagcagttgtttcatatgtttatctagtttctagttgtttctggcaggtaagaagtctggaccttcttgctcccttactgccttgtatgtccattagtttttataaagactggttagctagtaagactattaaataggatcttttcctccctgctggctctcatttctgagtaaaatttttgggagacttgtttggcataggaatcttgggatgggagtatgcttcacaggctttacttttgggtggctggaaaaatggctgtcaggatgtggaaaaactctcaaatgtcacaataagaaatggtttactccaagatcttaggtacagggatggcaataggaatgctaactggtgcagttaccctatatacagacatttagttgactcccctgaatgtgggaagaaaatggctgcccttcttcctccctttttccattgcacctgttgactcgtagtccagcttctgcttcctccacggtgccctcatggcttgttctagggcagtggcctcccttctagtaaaaatatttgagcatgtcactgatattcactgaattataaaaattatgtacatatacagatatattattatatatttaataaaaataatgattttgaaatgaaggggtacaaaatacctaaaaatagaagatattttcttaatacatctcctgattatatgttcttcactttggagactactatctctttggtgacttcttccatcaccttatttctgtttattttcagtcacccagcaaatttactaaattctctcctttttgtgtatgtgggacgcccttttgtaattatgggtttatttcttttactgagaaagaatggaggcaaatatttgtgataggtccaccattttgaactggaagtctgattacacttcttaaaataaatttttgaataatcaaaatgtcttttttttttttttttttttgcaattcagtttgctttcctggttgggagcagaagggctgcagcccaagaattgcttattacctgcgggaagtttttgttatgcagcagttcttaaatttgggtaatgtcaaagggcatgtgaaccaaggaagttgtctgctaatttcaccagaagcaaaaaagtttaagaacagctgctctggagaaatattgggatcacatgagatatacttttcccctatttattccacattccttaatttagaggacagtataaccatctggagaggatccataattgaagaaagaacattgtttcattcttctgttgctgattgcacctggctatataaattcattgtcatcttctaggttttcatactgttgatataccatccctgaaaccaacagctgatataaattgtaacatagaaaagctaatttgacatcatattgggaatgttagccaattgatttttcttaagggaaacaaactgaaaaaataagcccactatgaattaattctttgcaggaaattcccatgtctgattatttaaaagaataaattctgcatgcaaatgaatcattacaagcttaattgaagcttgcgggatactcaagtttactcactgtggtgtgtttttgatggagacaggaagtgaaaaagcaaggtctatgagacttttttttcctatgaagtctcagccagtcttttaatgtttctcattgagaaactttggttgggagggtaaatgactcaaggtatctattgctgcttagccgtttttaagggggcatttccccccatgttcctcccctccccaaaatagctaattatgtactggaagtttcaatacattgttcacagtttgtgaagtcagcatatttctggaagctcactgtgaatgtaattcttaactgtacaaatgcttttgtttctccatctctgcagctagctctgtactgtaaggacacaattctatcgctattttttccctcacatttgatgtggtagtttgcatacagctgcagagtagacagttacctttgaaaggaacatttggctgctctaatttgattaaagaaaaccacctcaatcatttctagactgagaacgttttcattttaacttggcagtaggagttgggaatgtactcattgcacttagatatgtgggggaccagttagggaacaaaaccaactgcttgaatgaagaaagctttggtgcattttttttttaaaagcaagcagtatgattccctttctgtttccctctcaaattctctacaaccttgattttcacctccatcttcttttcacggttatttactttgtaattccagtaaacgaattctggcaggaatagactgctaccctaaagtgatttgtgatttaaaggacttcagggtccttaaaaattatcccattttacatagaaataaaatcccaaatcatgaattactatgaattgcatatattttcttggccactgttgagaaaggcaaaaaaagttgttagatcatgggtgtacagaccaaggctgggaatttagttgtaacttacttagaagaaaattgctccttgtcagaaggctgcagtcaactcacatatatgccctttgtttctgacatagaagagggtctgatcaccaaattagtatgacaattaaaaataaattctggtgattgtgaattggcatcaactttatatatgtttttagaaatgattgagcagtggttaatgtctgtacggtaaaccatgaacaaacttttgaaccacagctcagtaattcaatatatgatatccttgtgaaaggtactgtgctgtcatcttaaaaagtttgagtgtgggccaggcacagtggctcatgtgtgtaatcccagcaccttgggaggctgaggtgggaggattgcttgaggccaggaatttgagaccagcctgggcaacgtagtgagacctcatttctacaaaaaatatttcctaaaatttagccaggtatagtggcactcacctctggtcccggctactctggaggctgaggtgggaagatcaaggcttgagcctaggagtttgaggctgcagtgagccatgatcacaccacttgaccccaacctgggagacagagcaagaccctgtctcaaaaaaaaaaaaaattgaatgagaaaatttaaattaaaagtctgaagctacacatgggcctcagaaataacaaacactattacttattgattattggatattattgattacctaagagaggaggtcaaatgtgggttcacattccagttctgccacatgactatgtgtcttaaccccattatgcttcctacctctaagcttcaatgtcttcatttgtaaaattaggacacatattaagtgatgtctctgaagttaggtaccttttaagtgttttgttttgttttgttttgtttttttgagttggagtctcactctgttgctcaggccagagtgcaatggcaccatcttggctgattgcaatctccacctcccaagttcaagcgattctcctgcctcagcctcctgagtagctgggattacaggcacatagctaatttttgtatttttagtagagacagggtttcacagtgttggtcaggctgatctcgaactcctgacctcatgatcctccagccttagcctcccaaagtgctgggattacagacatgagctgctgcgcctcgcccttttaagtgtttgatacttgtcaagtacttagttgccttacttattcctctccttcagaatattttgtaggggggtggttttgttaataggattggtggcagaacttgacaaaatcttcaaattctaatattatgtgcatctctcattctcttggacaaaatgattaagtccattaggaatctctcaagtctgcctactttttctctggttaagtgtgacattatatcaggtagtagttgcaagggcaaggcataggtactacggacataggagctgttcaacaaatggttgctattagatggagttacactgtcatcttgaatgccaccttctgccatcttcaagtgctataattatttccacatttaatctcaagactgttcactcgaagccaccccagtttgttcttccttctgagagtcaaaggccaagaaagaatcttttcattttgtttttacacacggtaaggagggcgtaaatattttcagccacgtgtctcagtgtacaaggatggtgaagggactaaaacgatgtttgcctaaagtaccctgctacattggggtttgagcactcaggatttctagtagatacaacattataactgtagttgaatcccaggctcgttcacaatgcttatttatatagctgaagaatgtccaatgagtaaaatactgcagaaagcaatgctggagacctgtggaaattctatgagaaaatgctgggtactgattatttatgttacttcaaattttctttctctcaataaagtattattttgatatttctcctatataattgcctttttttttctttggcgctgggggggttctcattctgtcaccgggcgcgatctcggctcactgcaacctccgcctcctgggttcaagcaattctcctgcctcaccctcctgagtagctgggactacaggcacgcaccaccatgcccagctaattgttgtatttttagatggggtttcgccatgttggctaggatggtctcaatctcttgacctcgtgatccgcccacctcagcctcccaaagtgctgggattacaggcgtgagccactgcacccggcctataattgctttttttgaagtatatttatatagccctttactattgaattctgcccatctacttactattactgtttatcttcttatgtcacttccaacctgggtgacaacttaaacattcaaatccagtaaaattattgtatgtttctaataaaatgcatagaagctagcctgagactgaagttttgttttttaaaaaatatgtaatgaattcatcacttcttttcgtcatgacagttgtctacttcttaagtgctgttaatataattacgttcacagcagcagtgagggagactgggggaggattgttattcccgtcttgcagataaagaaacagacaacgtaaatgacttgctcaaggtcaactgtctgctggcagagtcaggactagaccacaagccttttgactccagggtgttatttcccctattatatagtttttctacctaatactacaagtgtttcagtcatgcaaaggtcatttggatttgactgttttagtaagacctgcttggcaaattaaatgcacataaactgcatgctgacaaaggcatgctgtttatttgaagaggaagctatcttgacttactggaaactagaggtataatggcttaattctgacagatagtaaatgatatacatatacacacacatacacacgcatatatattttcaaacaatctattttcatagccatatctagagaccagcatatagaattgacagtgttaagtagtgttatttgttagggttcatgctgcttctcaacttggtggcagttagctttccatgacctaccctgcgttactgagaaaaggatggaagagtagcaggtcaaaggaagtacgcatacctttgaatctggcaccagaagtgctgacgaggatgttgcatatgctcacgatgactcagcacttcctggtttctcttttcagccacactctggctaatgatatcgaatgaccttggttcaaactgagagtttcagggaacctttggtttcttcatcatcaaaaatttgcagtctttcctttctgtttttaattagttaatggtactaggtatgaaccattatatttcacactggattagatactttttgttcttaagatggtcacaatctaaggaagtagctttgaccctggactataaataaatatacccttacctctcaagtaagagcagtcctgctataactcatttggtcttttattgtttctgtgcaacctaataagtagggcaggagtggaaggaaatggagttcaaacttcagttgcactgtttgcagctttggttttaggaaaggcttagtgaccagtaaggccaagtaagggaaggtaattgtggatctgccccttgggtccctcatcactttctgaatggtccagaataggtctaccatgagtgaaaccagattgtcgttgtcaattagttttatatttaggatcagccacaatttttagactctaaaattattaacattgagcacatttggagatgaaaattttcagaaaacattgaaagttccaggaaaccttgaaactttttaagcctgagttttcctgggctattgagagtttctccatgttgacagccaatttgttttacaatttatgaaacaatttaaaaaccattttatagattatctagatatatttctttagaaatatatcttcattattaaaggaaatcttaaaccagtggtttgcagtgaaggaaatagctatagtatagcaaaaatatgcctatatttaaaatacaaatatttattgttaaatgtgtttatgtgttttcatctttacagaggcctctaaatagccaggatttctggccctttaactgcttccaaataagcaaaagtaaaaattcctacagaaaacatagccctgacctttttgcacatgtaatccaaacaaaaagttagctttgaaatggagtcttgttacataatcatactgaaaatatgcagtaatatgtattcctttgaatatctttcattcagaaacatatttttgtttatttgactatcctcccagctgaaaatgggttatgttctggttgttcatctaaccaccctacctcaaaatacttgagaaatcacatgaagaatttcattccaaagcatacaattttcagaagggctcaggacattggaaaattgcacattggatttaactccattgatgatttaaataaatagcaaataatgcaagaagatagataaacagaatatacaaacacagtttttactaggcagaatacctgtccaattaatagtgaattatttaagcagcatttactttatagaaggcactttaagtgaatcatttgtttcagatctgtctgtaacatttctaccaaactatttggccgactataccttatggtatcaagcattctaaatgtgagaatactggccaatataggcaaaagcaaagaaacctccctcttttcttgtgtgttctctcagatgctgctatagaaatctgagaattgggagcatatgcttcagactgcaggcttctgatgctgccccgcagcaacacagtaactggcattttggttcactttgcattttactcatctgctgatttaatgagtgttctgtgtattgagcaatagcaggagttctacttaactatcactaaacataaagaagaaaaataccatatgaggtgtctagttttttttattttctttttaatttacaggggagtcatctgttaacttgcgtaattgaggaatagagcagtccagttaataagaaagcttagttattagaaagttgccatctcttctgagtccccttttcaaaggattagaatgtgataaaatacacttaacactaaaactcataatttaatctttgttgagcattgagaagatacttcaagatatatcctttattgtaccctaataaaatggtagttatgatgaatgatgcctatgcttgctactagagaattatagttaataaaattttcgcttggttataccgtttgactgttcatcatgatagataagagaaggccttgtgtcatgtccaatggaaacacgaagtcaattgctgaattatgcttggttaggtataaaatttcactttttaaatttatttatggagggaaaggttgagatagtactagtgaagggcaagcaggaagtttaggtggagaataaaataatgagaaaccagaagaaaaataatatgtatttatatctatacctattatatatattgatatatatctatatagagagatgcagagttaaatacattttatttttagatagatataaacttacatataattatgtagatatatttataaggagatgtgtatctatgtctagataaagagatgtatatctatctatatctagatagatatctctagatacagatatataatctagatatctagatatagatacagaaatctggagatatatacatctctctatctagatatagatatctctagatatagatatacatgtctccatatagatatagatctactttcagaaagtagatagagtaaaagatgaccaaattagaagagatcaaattaagaaaacaaatgatttcttaaagttttaaaaatatcatggaagggtaaaaattcatatggcaaaaacttctggatctagaggctctcaagattaggtagaaagaataaatgaggttaaggggaacagaggacaggtggtgaacaaaccaaaaagttcaagggagtgatacagaattaaaactagttcagctccaaaattggtataagctacaacttcagtatggcttatcttaaattgttgacctcttgcccaaaacctaaataaatgtgtatttgtttgtcctcttcgtattatgtctcttgtgggaaacacaaagtaaatttttcttgcattcatctagcttatggtcttacggtagaaaaatatggataaaacagttgttatcaaaatgaagaaatgcagtgaagcgcaggtaaaggctcacagcctttctgtctagtgctctgaatgtcagagtgaacaaaggagttgttatacttggcatgctaacaagagaagtcggtctgttccgcatgttgcaaaatttctattggtttttattgttggcattaatatacacgatatcctgtgcccgtcatctggttacacagacatttttgtcatgttataacatgaactgactgctttaaatgtataggtaagtggtaatcaatttacaaaattaggttcttcattcctccctgacatcctccactccttcccaccagggtctgcctctttgcatgtggacacgtgcatatccattttgcactttattacatcgttttataaagatgctaataaagtgataagtagtgataaaagtaaagggatggtggggggaatcactgacaaaacaaaagatcacttcagaatctacaattgtacatgttttaacgggcgtctttgatagtcctggatacaggctcagaacactttactgaattttgggagagttgggaacatacttctatttatattcataagtataggaagaaaagccccaactatctaggtttatctcacgttgaggattagaagcttctgtagacagtgtatttcaatcatgcttttttcaagaagatagattttttaaaaacttattttattgtggtaaataaaggtaatatacataacatatgtggtcaataaacataacatacaatttacagttttaatcatttttaaatgtataatgcggtgacattaagtacattcacattgttgtgcaaccatcactgctatctccagaactttttcatcatcccaaactgaaattttgtactcactaaacaatgactcttcactccccttcccctacaagaagatacatttttaaataacattttaaaatcagaagagaaccggtaggtagtttatgccatagccagtaaccttagggttcagattggaaataatagagacccactgaaactagctcaagaaagagggattttattgtacggggggaacaaggttcatgagaatcattacacttctggtctcctggaacaggggttctggataccaggagcctctgtggagtgctttaggatagttcttaaatcgtttcgaagttttactaagccttttgaagccatgtaggtgttactagaccggtataaaactgcatgccaagacttcatggtagtttttttttggtcataacatcctttccaatttcaactatagcacatcatgattacactgagggagtttatgaagagtaggtttcatggatgaacattatcagtcttgaccatagtgacatcttgagctcactcattttggtgggaaaatcatgctttcagagtgaaaagttggaacagcatgacggaaaatggatttttattttaaaccattgagaagaaatgctgtatgactttatgatggctaggagataccttacatataattacctcacaagctgatgcttttaccaactaacccccaaagcagcatctctttgatcctgagtgacttgagccaagggaagtggcaacgtgatggtggtgaagggtgtggagtgggcagattacatgattcagtctccaactcatcccaagtctagccatgcccctcttagtatgcctactttaagggcataggctatgtggccaattttccttcatcgagatttcaagctctttgaatcaagagagaaggcaatatgtttatttagaggttaagaaattataggctttcagagttaataggttatctaatttttctactcattcgttcagtctttgaacctagaattatacaaacagtacatgaccagtatttgtcccccaagatcacattacagcagtggtcttgaaccaggggtgaatttgttccccaggggatttgacagtctttgaacacattttgtttatcacaactggggcggtagagtttatagatgttactagtgctgcgactactgccactaacatctaataggtagaggttattgatgttaagtatcctgcaatgcacaggatggctccccacaacaaacaaatttcaaaatgctgatagtcctgagattcagagctctgcatttcaaaaagacactagttaacaacaatttgtagaaggcaaaaaattataaaggtctgcagcataaattggaaaaaacacataagtccaaccatctagcattaacaagctcacattcatataattagcactcctaatattagtatttttcattaccatcaataggcaagaagaggaaaaccaagagtaaggatagtcttttcccacaattgtttgattgggagcgaggtgagatggctgaaatggacggagttaaagacaactggaaaatgtgagatttccttaagagtgtggctcagaactagaatccacggtgaaggttgttgaaattgttgttgatttgttttggttggctaaatttgtgaattagttgtatttggaccctgctagggaatcaggggtttaaaaaaggaagctaactagaatgaggcctaaggaatgggttagctcagtgactggttcttataagaggggatgcataccctcaagtgaaagggtctaggtaattccaggcaaccaagacctcaaatcagagctccctctaaattatgaatgcattgcctcatctctgttctcaattgtcctaatgtatatggttggtatattatgttttatatttttcttttcatgcctccatttataaaatgtcactaatctatatgaggtgatcaaatgaaacaaaccagtggagaagtgactcttaagattaattaaggtaggtaatattgagatctatgaatacggtagatggcttatataggttgaggctttacttctttttctactcatccagacttgaaccttgaagattaatttatcctacttgtcatagtttgatattaaccaagtctaatagattttccctttaaaacatttcctggtgcccattttttcccccttttcatactgtcccgggagtcaatcaatataaacctgtatgagtaacttttttctctctctcgtttgggttatgttccagttcatatgatgccttcttcccacatcacacatgtgccccaaaatggtcttgaatgtctaccatctcaaacccagactttttgatttgtggtccaaagctcttcgtgatctgtatccgtcttacatgttcatgtcccacactgtcctctaaatggggactctgccctcatggctctcaaacggagcctgcttgctctctccaaccagcctggttcatgtggctgccctccatggcttacttgctcttctccttgttacctatgtgatattcactcatcttcaaaggttgcacctggctgtcatcagctccatgggagcatttctgaaaactttagtactaacgttcactcctcccttgtgaagtttatatcacctggtttagtgttgtgttatatcttgtcctacagtgtccttagttattcacatgtgcatgtcttctttcctcatctatagggaaagctccttgtaagcaaaacctgtgacttattgaaggttcacatactgctaaccatattgcaagtacttaataagtgcttattatgtggttgattgtgcaagatagcctatttctttaaaaatgtcattgaaatgatatgtacaaatacagtataatattagttattatacaagaagtacttgaaaagattaattactgccagtcatcttaatattgggtgtacatgggaagggcatatttgaaaaactgtaagaacgcagaatgacgaattggccctctatagtagtagttctcaactgaaggcagttttgctcctaggggacatttggcaacatttccagatatttttggttgtcacaaatggagggatatgattagtatttagtgagtagaggtgagggaagctgctaaacattctacagtgcacaagacagtatccccataacagtgttatccagcctcagatatcaatagctccatggttgagaaaccctaatttacagcattgagtgggcaccatcattaacatactttaccacctaaaggaatgaaagcatgcaaaaagtagtgcatttttatatagaggaaatgatcatatattgtaaactcctaaacggtgggaactgcagctgtgtacataaagcagaacagtcggatagtttaaaagacatgtgatagctgcttgtaccgtaaacgagcactttatgtctttggcctggactttgagaggagagaatgattgttaagtagacagaattctcttaatactgaatgcacatagcccataattttagaaaattagaggcatttgctaacccagaaggatgtattggaatttcaggtcaaatttttaataaactggaattcctttgcaaggattgatagttatattagaatattgaatgaaatctacctccttccattttttcaaatattttagaagcttccttgaagaatacttgatagtttttaaggtgtaagaataatattatttccctaaataatgtgtacacatggaagcagagtgtagaatgttggacaatggagactcagaggtggagactggcagagttctggatggaggggtggatgatcagaggttgtttgatgggtgcaatgtaagttgcaccagtgatggatgcactgaagaccctgacttcaccacaatgcagtatatcagtgtagcaaaattgcgcttgttccccatgaatatatacaaataagaaagtgaggaaaggaaggagggaagggagggagggaggggaaggaaaggagaagggaaggggagagaacgggggggaggggaggagagaagaggagacgaaaagagaggcggggtggcgcagcagctcacacctgtaatctcagcacttttggaaagctaaggcgggtggatcacttgtggtcaggagcttgagaccagtctgggcaacatggcaaaaccccatctctaccaaatgtacaaaaattagccaggcatgatggcgcacgcctgtgggcccagctactcaggaggctgaggtgggaggattgtttgagcctgggaggtgggggtgacagtgaaccgatatcacaccactgcactccaaaagaaagaaagagagaaagagagaagggagggaagaaggaaggaaggagggaaagagaatattctttctctcttgaaattaattttgggaggtgcttatgtggccaagagtggtatggtggagggagcagttcagagagatcctgggcaggacaccttaaccattccctgcctgtttcctcattttcaaaaagaagggctaaggcttgatgacctctagctttaaaattctatgtccctgtaatttcagatagagagagagagagagcacgcatgtatgtacagttatttaagaaagaaactttgaaggcaatttttccagttcatttcttagaaatttcagaaatattccattctctaaaagcttaattccagtgtttaaagaaaggaattcctgttataaataaaagttgttctctgctcccaatcaaaataaaaagagtgaaataaaatttacaattgattcaaaagtgtcgttattagctaattttgaaatttttatctattttcttttgtttatatttaaatataaataaaatattttaataatactgacttttctcacacaattcatgttagaatttcttagatggttccacatctgagaagtttcttgcttgtaaaggtaaaacagatttggaagctttataatgatttttaatccatcatttcggaagttactggatattggacaaaatgataaagtgttattttctggatggaaaattaagtagagccttgatactcaccaggctgaggatacatcccaagaaatgaggcttgcttctatggtgtctctgttcttaggtttcctcagagtccattctagaacttggataatgagattgcctgaatcgaagatgtttttgggatgggcccagagatgcaaaggatatccagctacatattagatcttattcccagaattaatgttgctacagggaatagcagtacatggcatagaacatgttcataaatagtgccttagatgacttttggtttaacagaggttaattgagccccccctgaatgcaaggcacctactatagggactacacagtgggtcagattgtgtattccttaatctctgctttaagtgagtttataacctagtggggagagagaaagtgtgtgtgtacctgtgccaattactgtaatacaaagaataaagctatcgtgaccattcagagatacagacacaattctaggccagttcagaagacaaaattaagtttaatttgcaggagcaagaaaatgaggctccaaacaagagaagaacgatgtgaaaagaaacagacacatcgtatacatggagatgaatgacatcacgtatggcagacgaacctgaggtgctgagttaaccacagtgtgaggagaagaggaggaatggagataatgcccaatcgatagggtcagaatcatagcagagggtaaagcggcctgaaatggaatctagagacaggtgaactggttaggagattgaccattccctggagagagaaaaaataatggtggcctaaattagggtagtgcccttgaaatgagaggaaggtttgcatatgagagatagttaagtcctagaattggccaatgtgggtagctagttagatgtgtaggtgaacagagctgtagggtcaacaagatgaattatggttttatgcttgagtgagaggatagtgatggtgatgtcactgttagaaatagcattcacagcagaaggagcaggtttggagggacaatgatgaactcagttttgaacatgttgagttacatgtgttttcaggaaatagccaaggcagagttatagtcaaagttcaggaaattgagagctccatccagataggaatccggaaaacctgtggcattcttaaaggagatgtatagaaatcttttttgagccccacatttggaatatcacttttgcatataatttgtcccacaataaggagaaaatcacgaatgccccagtgtggttactgagcacatgactaggctgtcaccagctaagtgacttgttcacccatgccaaccttcacagcacaggcggttcaaaattgcctctgacacagttgctgtctgtagtagatcttcagggtcactggcaaataggaccctgtatattaaatagatgaatgagcaagaaatcctgtattttaagtgaaaaaaaaaaagactatggaaacttgagactctgcatttaggattgaaggagaaaaaagggggcagagagaaaagcagacacaagagaagtagagggagaagtaaaagaaaactctcagggaagccatgggaggggagagtttcggggaggagtaggcatctcattctggtatctgaggtgcgtccaagaggtggaagagcctaaagactgcatccagtagtggggaattactgctatccatttgagagacagatctcgctggaagagaaagaggggaaacctggtaatagataactaaggagtgagaaagtgtagcacaaagtgtagaaactgtagcacaaagtgtagactgtcattcagtaaattgggggacatggaatgtggctggcagaatgacaatctgatagagataggcacagttaaacatttttgttgttatgaggaaatagggaagtgtattagaaggagccaggaggggaacacttaaaggggaattgaatgaaagggaataaaagctgatgaattgcagatttagcatattgtggagaggcacagttcaggaggaatagggttcgtcttgaagaggaggacactttcctgtgaatcatgagggacagaagatccatatagaagaagacaatagctttgatcttctattacaagaaaaggacatttgtgtgaagcagggaggaattgggagccctaagtaaaggctgaggaagtgtctggagttaggaagagagggcaggagaaggaagagctagatgttgaagaggaggaagcagagggattggctgtcctaagagggacccaagcctgtggaagactttaaagtggtcagcacacttgggttcccttagcaacagagagactctccctcattcatcaataagagtggatttattcactgatatgtagacattaaaaaattgttagggtgacattttataaaaagtaagaactctcttatatagcagatctataaaaattagtgtgctaactgggcttagcaaaagttgggcaaatccttcctaaaacacagttaatatttgttgaattcctttttcatcaaaatgttaacttagagttgaaatgcaaaagaagagatttgataaagcattttgacatttggcattttaaagtaatttcattagatcatcaagctatgaattattaaacattattctactgtaaacagtttttttccattatctttctttgaattagaaacaagttgcatgccatttgcctagaagaagataaatgtattatgcactaaaatatacaaagattttggcactgttttttttctgctttttattcattaatgcctttgtttagtcttacatcagatgaattggacaaatttgggctttgtatggctaaagccaggaacaaaattctctaacagtgttgacaaaattcacttgaaaagtcaagtcatcattcaggacgagtcattttcaatttaatttccaccctagcacacttgagaaaagtagagtcatctgttatagtggctcccaggatagtgattccagtaacttccagaggggacagttttgctcactggagcacctccagtgttaacacatcgaaggtgtccaagatcccgttgttgtctggctgattttccgtggagagtgaggaggtgtttgacaaggccctgcaggggatttcccatcccatgaggcaattcataaccaaaacaattcagtataaaccaaactaacaattagccttttcaaaagtgctcatctgtgctgcccaaagagttgatttctttagaagttcttctaacaaaccagggtagtcctgatctttattcttataggttaaaagttgtaggagttaaagtcaaaatgcagaaacattatgctacagtgtgaagaaaaggtatgtctgagggccagggcctttttaagaggcagtcagaacaatggctggctgcccaaacatagggagccaattctgtgatgtggttgccatgttccagtatccacctggcactaaatgcctagaagcccaatttcattagtatatatagagggtttgggagtccaaggttgacagactcatcccgacctcacaagaaaactgaggtttgaacaaaaatgttaatgcattcttttccagtaaaaactgtacatgtcaagtatgcttgcatctgccagccaaatcattgtctcccttgcatgcttgtctgtgggaaagccaggttatagtaggatacttgcattgtggacatggaacctggagaggggagttagctgatgagattaatgtctgatagcctcaagctctggtgccagttgcatccattttggctgtaggagaggaagtttcattcacaaactctcacctatgacagggttgagccatgctgccagttgtgtctttccagagtttgcttttctatagataacatacatactttttgtaaaagtaccgtttagttgtcatcacagcctagtctgttcgatgtggggtggtcatagtctcttgggccttttctattggtagatcatcctcatccccacattttggttttccctatttccatcttagagtttgtccatcagttcagttcaggggataccatgttacctgtctcatgtcctgcttatggatacttttctgtctgttcattgatataacttctctgactaaaagctaacctcctggagataaatttttggcacatgacttgatagtggtatttaaaaaaaagtttaactggtataagtggaatattttaaagtgccctgtttatttacctctatgattaaacagttactaaaatataaattatagactttgagggttttttttgaattttgatacagagatcattttcttttgaataaaaaataatgtgtttacagttaaggggaaaatatcctactcttaccaactcagttttccctttcaattgtaaaagggaaatagactgtatatctttacaatgtagaaaagagatgtggaatatccaagactgaagaaacaatgtttaggataaataaacaatatttatgcacgtagcaacttataaaatattattttctctcaaattattctatgagaatgatttaaaagactaagagtctgtctaaactatctggtttgttatcatttttgtatcttgaaacaagtcagtaaaaactatgatctcatagagctacttgttatctgctaatttgtcaattttgctttttcttttacttgaaacaaagaaatgcaaaccaagaaggtagtgattaaatatccatatgtctataacttttaaaaaattgtataaatatatatttattcctagggttatatttttcaaaaaatctgttgctcattacagaaaaaaaaactgatacatgcatgctaagtgaaattttttttttggatgagtttttttttttttttctccaagttaatttcagctgctggtggtgttacctttgtcctccatttaggtagcattgctctgtgtttacaactttccatcttagtttcagtggatattcttcagagagtgaccttatgctcaaataacacttaaatgtaggacaagaaggtggctttagtagaatgacctcctagtaacagctaagaaacactagtaaatgacattaacagagatgtacttaataggctaatgcttagatcaaacctttgtataaactaattcaaaatgcataatgtaaaaatctataaaattctgacacaagaaaaactggttaaattaaactatctggatattaaaatctttgaaggacatttaaacacagataggcttattgatttagacttggaagatttagacttggaagaaatagcacgactgaatgtgtgctgtggcacagttagttctcttctattgttttaatgatgcccttaatccatactgggacagggcttatctaggatgtgatttaaggtatgaagttacttctttcaggaagttttcttttttgtgattccttggaaatttctcaaaatgttggaagagtgaaacacattgtcattgtaacacattttgtgacctagttttggtctgagtatacttttttactagcaagatacccagaggatttagactttactctgacagctaaatgaactcaaatgtatactgaatgtaaattgctttgaaggctgtggatcacaagttaatagattctggaccttgttttccctttcatgagccaaacattccttggatttaagggtaggtttaaattaaagtgtagcaaattgcttccctctttggaaataagcaaaatcacccttctgataataaaatatttcttgaacatgtcaagacagttactgaggaaagaaagcatgaggggaaaaacgacaataacttttcagagacttgctctttaggaaatggaatatgtttagtaaaaggataattgccttatcccatgtgacttgaaaataatgagacaaagagaaaatgaaaacactccatacaagaacttatatgaccaaataaatctggtcccatgggaagcagtccagtttttctagccctactttaattgagcaaaacattttcagactcttttggaattatcttcagaatcgttttatgggccaaagaatcaacatctttattatcacacctctttttggacccaaaagaatattactcagcctgatcccccacttaatttatcagacttggttcaggcttcttccaaaaatacagtacactctcttataggacaactgaatatttttcttaattcatattatatatccattcagcaatcatggctgagcacccccaatgagtcaggtatgttgtggtagcacagaggagtcctggctgtgggagagggagggtggaaggggagacagtaaggatatggagaatgtgtgagcataatctttgaagatcagtagggacgtcaccagatggacagagaaaaagagagctttctaggcagcagtaacagctggtgttgaggcacagcacaaaaatcacgcacattctagcaactgtaagtatttttaggatccaataaaagatgaggatggagtggcgagtggggcaagatcacgagtgacctaataagccatgggatggggtatgcagtgtttaagagtgagggttctcttgcttggttttctgagtacaaatcctggctctctcatttacagtctttaggatgctgggcaatttactaaacttctataccttaattcttctcatctgtgaaagagatgatggtacctgtattatagggtaaagagatttaaatacataaaacaaaattattagcattgtgtctgacacacagtaagcactcagtaagtgttagctatttcttctgctactttgtccagtggataaaagacaatagaaggattttaaagagcagaacacacttctttatcttatatacaccattgaccacttctttcttcttgaaactgactcttgccttgatttttttaaacagctctattgagacatacttgacatgcaaagcaattcacccatttaaagcgcttgattcagtgtttttactatatttacagggttgtgcaaccattgttaaacagtctgattttagaaccttttcattctccctcaaagaaaccccatacccattagcagccattccccacttttccccaacccccacacccctggccttaggcagccactaatctactttctgtttctgtagatttgcctactctggccatttcttacaaatgaatgaacatttttaattttgatgaatctgtagtgatctgttctttctaatattgcttatgtttttggtgttataattaagatattgcctaacccagggtcacaaagatttactgctatgtttttttctaagagttttatagttttagctcttacatttaggtttgtgatccattttaagttaatttctgtgtatattgtgaggttaggatccaatttcattcttttgcatgtaggtatccagttatcccagcatcatttgttgaaaagattattctttcctgagtgaatggtcttggcacatttgttgaaaattcatttagcataaacatgaaagttaatttctgcactctaaattatatttcattgatctgtttgtttatctttatgccagtaccatactgtcttaggtactacagctcatggtaagttttgaaattgagaagtgcgagtcttcgaacattgtttttctttttcaagattgttttttgctattctgggttccttgcattatcatatgaagtctaggatcagcttgtcaatttttactaaaaagccagctgggattttgatgtggattgcattgaagctctagatcaatttggggagtattgcctcttaacaatatcaagtcttcctgatccatgaatacggatgtccttccatttatttagctcttttatttcttgcaatattgttttgtagttttcactgtacagagaactcttgttaaatttatacgtattttgttgcttttgatgatgccatacattgaattttttttaattcccttgatgttttatgatatcattttcttcatctattttcttgctcacctctctgattcatctagggatgctattctgcttgttttatgttttgcctccaagattccgtctcatctggaggctgataacttcccaaactattgcttgacttgtgtctggagctctgagaagtatatgtttacagttgtttattggactttaccacctgaatgtcacagacatctcaaattaatcttttccagactgagctcattaattacttcactcatcttattttcatctcttcttatggcctttggaaatagtactatcatctaccttgtctaaaccaaaacgtgaaactcatttcaaacttctctttcaacttgtacattctggtaggttaccagatcttctggattccacctcctagatatcactatgggagtataaattggtacaatcttctgtcaggtggtttggatcaagaactttcaaaaaatatatatattttgattcagaaaaagtgtatatcattttatttttaaaatgccacttctaggaatttatcataagataataatgagccaatgttacaagaacagggaaatggtctaataaattacatatagaatataatttagtgcaacctaaaaatggagatagatttgtgaaagtggttggtacacttaaacttttttaattgcaaaacatgattcaactttgtttaacaacagtagaaaataagttctaagagagcagggatcttgcctgatgatcctgatagacagctgaagagtataatgtgctcagtcaatatttgttagttgtattggtctctctctgctgctactatttctgtaaccaatctgtctatattttttacctgggcttttgcagacacttcctacttgttttcctcacctccaattttattctcctataatccaacttccattctgcaaccagagtagtatttccaagtgacacatcctaccatagcattgttcattgtaaaagtcctttgcttttttcccagtgcccataagataatttccagacttcttagcctggattactaaactctcataatttcacttctgtgtacttttccagctcttctcttgccattttccaagataatcaccaaatcatgccagactatccgcaattccccaaatatgaatttttctgtgtacctacatacctttggacatgctgttccttctgccaggaccatgccaaacttcctttgtttatctggcaaattccagactgtcctatgagactcagctccccagccacttcccctcgaggtatgttgaatgcctcttcttcagggcctccaacaccatttgaacttttttacaattcttaatatatatacattcctctagggctggagagttagccagggcaagcctgtctattcctttgacttcaactcatcatcttactgctgcactgacttctcctatattctacctcagggctttgcagtgttggtctgaggcctggtaccaattttccatcatctgtgatgcaattagaaaaatagggccctgtggtaaatttttcagaaagctaaatctattcacatttgggatattaaaatatgctttatttatgaagtgatattgatagtagatagtagagtatattaatgtctttagttggcaatgttctgtcagagctgtaaagttgttggaaagtttccaggcctctgaaaaccaaagatctgggaacactgctgtatctcatgagggtggcaccaagtccccaaagtcaaaagcatgtgagtcatccttggcttctccttccccatccctccacccccgccacatttagacacttagcaagtcctgccaactcaacctcctaaatatttctggaatctgtactctcctctccatccttgctgccaattccttagaacaggccttctttactttccctgtactactgcagcaacagtctccttacaggtggtcttaccacacttccccttacccatgtcatcagattgggctctttgaaaaccataaaaaatagttgcccactttccagaggaacaaagttctttgtagcatacaaagtttctctccaatggggcttcttgcggtgctcctgctcacactttctttggtttcaagtgccctttctttgccacttgcttgggtaactcttgatactctgacagttaaattgtcatttcttctacaaagttttcctccacatatggatgggttgcttcttttatcatttcttaaaattccataggtatatacataagagacagaaagatgtatgtgtatgtgtgtgtgcggatttgaataagtatatgtgtatacacttatgtgtatctgtgtataccgcagacatacatacctcagcatttacagaatagttgatactttgtctacttttcccactagactctgaataacttaagaaattttattttaccctttgatttttctatacctagcatctaatctaatgcttagaaaataacaaatatttaataaacgtttgctggttaaatgcatttgttcaatgctatcgatcagatttttactgtggaaggctcactgaccagagtaggggatgagtacaaagagtctcagggcatttgggaaacaggataaaggccctttgtagaaaactggccaagggtgttgagtgcctgagctcagggaagtggcagtggatggaaaaatatttaggtggtggaattggtggttgattgaacatgtggggaaatgaaacaatctacgattatttgaaggcttctgggtttagaaaattatttggatgggggtgtgattcaccaaggggaatgaactgtgttctagacattttgaaattgagatgttcagagtattggttgaagttgtccaagagataactgggtatggagtttggagaaagtactattttggagagagaagttggagatttaccaacctctaggtactctttgaagctgtgaccataaaggagataactgtcatctgttgctgattagattgtcatagtggtggtggtacattggggaagaagagaataggtccaggagatcttgatattgaaggtccagatcaagaaggagagaggcctgtgaaggtttctaatttaaatcttggttctgcctcttgtctctgttctatgatgcttgaacaaattattctatgaatcttagcttcttcatctgtaaaatgagagtaatagtatatactttataaggatattgaaaggattcaataagtttccatatattaaatccctgccacagtcccaggctcactgtaggggctcttaagtggtaaattcaagaaaatgttcctcaagatatgagcagtttcaaaacaaagaattttttaatggttaccccagagattacaattaacatcttcaacttataacaatccagtttgagttgatactatttcagctttaatagtatataaaacttttttctgtacagttctgtcctttctccttcatgttgttattgtcacaaattacatgttcatacgttgtgtggccattaacgtagacttataattactgtcctatgcatttgttttttaaatcatattttaaaagttacaaaccacttacctatgtagttagttacctttgccagtgttctttgtttcttcatatggctccatgttactgtctaatgttcttttatttcagcctgaaggactccctttagcatttcctgtagggcagatctattggcaaaaaactccctcagcttttgtttatctgagaatgtcttaattttgccttcatctttgaaggatggttctgccagatatagaattcttggttaacagatttcttttttcttccagcacttctttatttatttattagaaacagagtgtcactcttacatccaggctagagtgcagtggtgcagtcatagttcactgtagcctcaaacttctgggctcaaatgatctttctgtctcagcctcctgagtagctaggactacaagcatgtgccaccacgaccagttaatttaaaaaaaaaaaatcttttgtagagatgagggggttctttgtgttacccaggcaggtctcaaactcctagattcaagtggtcctcttgcctaggcctcccaaagtgttgagattacatgcatgagccaccatgcctggctgcttccagcacttccaaattgccatcccactgccttctgccctccatagtttctgatgagaagtagttgttcatcttattgcagatcccttgtgtgtgatgagttgcttctctcttgctgctttcaagattctctctttgtctttggttttcatagtttaattacaatgtgcctcattgtggatcttttggtctcatctgcatgtacttagtaaacactcaaataagtgatcataataatggtgcagaattaaatgattataatttaatggtaacagtaatgaccatgaatcatctaccagttaaacataatattgtgcttaaaaagtcaagaaaatgttcaatgcatgttaccaagaattccactaaaactttaattttaaaaaatagtttagggaattaagatgggtaagaatcaattatctaaaatattcacttacatgggacaaccagatgactaacagattattagtatatgaggtgttcctgtggttctttgcaaaagaaaacgtctgccttgaaatagataaacttgcagttacatttacaaattatctcccacagttttcattaccgttaacaccatgaaacattttccttattatctgagatacttctagaacaaagatcaaactctaaaataaaatggacttatagaaatatagcaaatcataatttaatttttataagtgtttgcacctgaacaaaacaacccaattttagatccttaagtttagaagttggtagaaataccagtttttccagcttctccaactgcagtgtgttttctaatattttaatatagtttgccattggtgatcttagaatatatttctagcatttttcttagttctcaacacaataattcccagaaattttgctctaatagatctaatttaaaaatataagatgttatattttaatttttataaggatctttatttttgaccaagctttattttggttgcttgcaccttgttacgttacaaagggtactgaattctaccatgtaggattttttttcttggtttatttaagaaacattagagtaatctgaagactttgtgagccatcgttgtttctcttttgtttcgtggtagtctgttactttgacctttttcaccaagtatcagaaaaataattttttctcatattcttttttgtagagtcactccatattgggaggggattgaaaagcacatactttaatgcggcagtaatgcatacatattattttttctcttagaacaatattttaagatttgtagagatttcaggaatctaagagaacaaaacataaacaaaaaatttatattctaagtggacaaacataaacaattctaaatacaaaagaatttatgtttttacatgtttgatttttaaaactgcatttcaggattgatgattaggatttcctcattaattcagaggaacagattgaagaaaagtacgtgagtggtaggagaaaaaaatctgaattgaaaaataggcttttatgattcttattttttaaataatttttttaattaaaaattaataggttctcacagtagaaagtttagatgagcaaatagcagaaaacaaccattccaaaatcttatcacccagaaatagccactggctacattttttttttttttttttttttttgtgatggagtctcacttactctgttgcccaggttggagtgtggtggcacaacctctgctcacggcaacctccgcctcccaggttcaagtgattctcctgcctcagcctcctgagtagctgagattacagacatgcgccaccacacccagctaatttttgtattttttgtggagagtgtttcaccatgttggccaggctgatctcgaactcctgacctcaagtgatccacccccctcagcctcccagagtgctgggattacaggggtgagccactgcacccagccacatcttgatttatctttctaccattatgtttacatatgtggaatcatactgtacacactcttttgaaacttgcatttttaaaaataatatattgtgaatgtctttccattttcaataaagatgtatcagtaccattattttaagagccacattatatatatatacatatacattatatatcatatataatgtgtatgtgtgtgtatatatacaatatatatacacacacagagccagattatttatatatatatatatatatatgtatacacacacacacacacacagagccagattattcttcagaaaggtttttatcagtttgtattcccacagtgatgtgggctcattttcataaacaagtgttgtgcagttttgtcattaaacaagtttgtttttaacccagtttgaaaggtttagtgtttcactgaggttttcatttgtgttgctttaagttactaaggtttaacattttcttctatgtttatgatcaaaagtttccttaaaaggaactaacttcagtgattgttttattagatcagtacctaatcataagtacctgagtgaattagtgctgggatgaatttactcacctattaaggatgtgattatgaaaggtttttggcttacagtgtaggtaaagcttggttggctttcttctaagacacagcagacagtcttcattacaggcggctgcctagttttggctgcttagtcatttttcctcaagagaggcccaaagctggagaacagggctttcacaggtcagaaatggacagagaactaaatgttgaaagttgtccagaatgttccacactctatctgacttaagccagagctgttcgctttgcttttaaaaatacacttaactcacttatttctgagatcagaatctctttttcaagctctgtcgggtgaattgaagtgtgccttttttctaactagtcaagggaaaaatgtaagagggtttgggatatcagcagtcttcgctttttaacatttttcctgtgaattttctgaacttctttttttcagcccaccatgtaaagtatgtattgggatcttttaatttaccaaaaacattttggctttggcattcccacaatgcctgtcagcagggtatctcatttgtcacaaagtctccccatcactgacctctgcttcactgcagctccaaatggtgtgctgcattcagaggcagaataacagagtggttagaaaatcagattctggagccagacagtctgatttcaaagcccatctccactacttactgtctttgtactttaggcaaagtattaaacctctctaccactgttgctgtccattttttgtttttaaacagctttattgagatgtaatttacataccataaaatgcacctgtgtaagacttcaggtcagtatacttactgagttgcacagctatcaccatgatctaaatttaggaaattttcatcactccaagaagaaacccagtacacattatcagtccccattcctccacactctcccactgctcattgtcccaggcaaccacaaatccactttcgatttctatagatctacctgctctgaatatttcatataaatgaaataatggaatacatagtcttttgtgactggcttctttctcttagcataatccctttaaggtttatccatgtcatagcatgtatttgttcttcatttctttctattactaaatagtattccattgtatggatataccacaccttgtttatgcattcatcagttgatggacatttgggttatttacagttttgggctatcacgaatgatgccgcagtgaatatttgtttaccttcactgcgtcatcattcagtgaacatttgtgtctatttcttcgtctctaaaatgagtaccatctcatacagttgttaagattttttaattaactagtaaatgcaatattttagtgtttgagtcttcgtttaacagcagttacaaaatctggcttactcagaatgccacgctttcctaatgacatcttgaagtatcctcacttttactttattttactttgacttttccctaagttataatttagaaaaatttcatttattcaataaatatttattgaacacctatgtatcagacatggctgtgggtgccactgagaattgaaagaaaagaataagcaaaacgcaaagaggcaccactagtttaaggctatctttagtttgctactctgtcatctctgacctgccagtagggcttgcgacttgagttcccctcaccccatcctctcaccaaaagccacaggttttggggtctctcagtccattcactcttgttaggcccttattttgtccatcatatttatgtttttggagtggctgattgaaggtaactgttaaggaaagactaaaagttcatcatgtctaggtggagacctcaagaggtaaacagtgccctgttcctgatctatagctgaggttggtgaattgttctttatactaatctagacctaatagttcctaattttctccattggcaggtcgcttctttttgtagagttggctgtgttctctttgaacttccaaatctattttgtattggaactggactcaccaaaattatcaactgattattgtttagctgcctacagaaaacagctattgtttagctgttatctttctcttgtctttggggagataatgatccacatggttagtgacttggagttcacttaattccaagtaggattttgcccctgctaccattctcttccctgcaagacaacaaatcgcattttatgatatgccttctttgtggcagctctaaagcttttttttttcccataatagcatgtagttagcataacagagtgatgctacagccttactcttttctctgcctttcattcagataaaatgcattagcagtttgaataattgtgtttgatgacgtagaagtgcctgtagtgcttgctgtatgtaggactatggaagaagctgaattctattatttaatgtccagttcaggaattgatctggaatgaggagaggggtacataggcatcccatatacccattaagccatcctaaatagcttgtttcaggcccagctagtagtacatcagttctgttgctgatcgtgtggtaggaatgtgtttccatatacatagttttactgtttgctctattttcaaaatttactatagtgcaagagtcacatcttgtaaacttgcccagtttaggggattcccattccacatgtaaaacattttttggttaacagattcagaagatattaactcctagagccacagtgccaggtctatatagatagaagctgaaactagattaatagcaactctaaagttggaaagaagataaacaatgaaactttcttatgaatactctcttaaaggctgtaggaataaaatgatttagtaaataagcaatgttgattttgccttcccttgtcagataatagcagccataaacttaacagtttaaatacaaaggatttctgtgctttagagttggtttgacatccctgtccttttccacttttcagcaacagctagtgggaaaggggttgtttaattgaaggcttcaggagaacacaccttgcacactggattcaacctttaaattaattgaaccctgtatctttgtattatttttaagttcttttttctccttgcttcctcttaccattgagttcttttctactctatgttttacattcctgtttgtgataaacttgtccatctgtcttcttccttctgtgctttcctccatccagtgtctctatggtcagatcaggaacctcaagtagggtctgagaggaagctgcctggctccttgggaaggatggattgatctggttctctgctgtcggctacttttgcccagtggacatgcgaatggaggagccatttaaggtgaatagattcccagccaagtcagagaactgggacagtcactttgaggacactgctacttcttttgtgcttgagcttcactcattgtgtctactctgtaagacgtatttgaggccagatattgacatttttaagtcatttaatcatttcaaaatatttatagatgtcttaggacaattttttgttgcaagtaataaaaacccaactcaagctggataagcaaaacactgactttagtgactcacataattaataaatccaggggtagatcaaacacactgggcccaggtgtggaaataatgtcttccggaatctcttgcccactgtcccttgttctggccctcttctgcatcccatagtaggttcactaaaatggtggcaaagacagccatcagtagctgcaggctgagactttgccagtttcataatcccagtgtagagttttactctcccagaagtcctagcaaaatttctgagactgattattatgctcctgtccacctctgaatcattcatcatcactcaatccagggttgttcacatgccatccgtgggcccctgctgttaaaaccagattgccagattctaggacaggagtagttcctcaacagaaaataagggtgtggcttccaggagaggtaaatggatggaaaggcagagaccatctgtggtttacttaataggatgtagaataaatttacttgatgtgatatataaagttgtacatagtgtttatagaatttatttggtactaatacatagccatacatcattacctgcatttttacttgtaagtcttctttcccacaactagatagtaaagcttttaaaaacaatatctgtcatatctattggaaactctaaaactgagtatagtgcctgcacatggtaggtgctggtaaatgtttatgggtgctgctgaaatcgcaatttgcttctagcagcatgcacattattgttggtggcaaatactcctggagctataccatttggtgctggttgagaataagtgcacacagagtccatatttaatgagcaaaaaagagaatacagtggcccatatccgtagtgtagggctagtgagatgtgtgaacataaatttggtgcatacaagacatagtcacagaatatgcttcatgcacttaagaggaggagattagatatttttaaaaattcttctcgattccaaatactggctctagttcaagcagaattttgttgtggcccttaggtagctgtgccagacatctctcagctcttgaactatttgatgtccaaacattgaagagaatgggggaaaaaaaagtgaccggaaaaaaatcctcatagaacttcctgtgaatgggtcaaagtttaatcacagcaaataagacagatttcccttttattgtaaccacaatagaaaggcagggcttgtgtttacaaagcatgttgtttgggagacctttgtaaattgtaatctttggaaatcccaaacctattggatgtaatcccatccattagatgaaggcaacttgcctatgcaatagttccagaagagcaagttaaattgagaacatgaacaggaagtagtcattaagaattacaatgggtaggatgcagagttaattcagagagatattttgttattagataattacatcactaggacagctggaaaactgagtgctgtgctggactgcaagccttgttctctgccctgcagctggcgggtcaggacaatagagacagcaagagaacttactttgtgggagagttaggggcttggccaacttaattgtgaaatgataacgacctatctgccttttttggattgcattttgcacagctaaactgaaggcatagccttagttaatgccaataaccagtttgcactttgactttttgaacattcacttggatcacattatgctaagctctaatggataaatatttaatggtaattttcctttcctttaaaagtcatctgagatattttgttcatattcaatacattgtgattacatttttcttatggaactgctgtcatgtaattcttgaaatggtatttttgtcaggttacagattagcaaaaatttttaaaaaaaggttttagaaagtcttaaaatattggtcaatataaggaatcatgcagttgtagctattttccagttttttggggtttttttggttttttttgttgttgttgttgttttttgtttttttgttttttttttttttttgagatggagtctcgctcattgcccaggctggatggagtgcagtggcacggtctcggctcactgcaagctctgcctctcaggttcacgccattctcctgcctcagcctcccaagtagctgggactacaggcgcctgccaccacgcccggctaatttttttgtatttttaatagagatggggtttcaccgtgttagccaggttggtctcgatctcctgacctcgtgagccgccctcctcgggctcccaaagtgctaggattacaggtgtgagccaccgcgcccagcctattttccagtttttacattcaagtgttcagacctgtctggctcttttgttttgcaagtgtaagggttctaggtagcctagccccattccttattgatttatataaatacattacagattgtttacctctagccaaataccagggattttaattcatgcttagctcagttgttgtatatgaaactcatttgttatattaaagtttctggccgggcacagtggctcacgcctgtaatcccagcactttgggaggccaaggcaggtggatcacttgaggtcaggagttcgaggccagcctggccaacatggtgaaacccatccttactaaaaatacaaaaattagccaggcatgatggtgcatgcctgtagtcccagctactcgggaggctgaggcaggagaatcacttgaacccaggaggttgcagtgagccaagattgcaccactgcactccagcctggacaacagagtgagactccatcttaaaagaaaaataagaataaaaataaagtttctgttttctctttattgcccaccaaagtgactattatttgatttggggcaattccagagggagtcattgtagacaaaaaaaagcatcataaatattatagtctagcatttctaagattaatgtttacaaccattgattcaaaatgcatttcctacccattgtgactaatataactgttaatttttagtacaatgtttactaaccattaatcagacataatttaagtcagacaaaatttcatagttttgggaagagcaatatttccccagatgtcttccatggagtactaggtctgtaggatgtggatggctagccagcactggagccaaaaaagagagtatcctacaggcacccttaggactctgatgtcccttgatgccctttgtgaatgtctgagaagtctctaatatgctccatttcctgaatgaagttaataataatggcaccttaaaaattaaaaaggattatttccttgaacctggaggagtcacttctacctaataccattttttaagaatatgcaagtatatacattaaaatttatgtgaaaatgttctgctctatggactattacacatctctttaaaattccatgttttaaaaactaccgattgaaatgagtccttttttctccaaggtttatcatttaggacaattagtagtggcttcagtgagctcacctttcgtatcttgagcatccattgaaactgaggcctggagtccagttgctgcaggtggcatcagtgagtcttaatattttgaagagagcagtataactctgaggaaagcaacttgggtgggttagatgttatttttaaattgtgtcatgcaaagagtgcttgaaaacggtttcagtgagatgaagcaacagggcatactgccagggttgttaggtaacttctaagacaacggtccagggggcagatgactttttgtttcagcagtattttaggatcactttattctccagttatgcccccgtcagaattttttctcttttggaaattactataatatcttatatatatatatatatatatatgataaactataaatgcagtaagaactggagttactaaaattactattgattccaggtagtggtaagcaatgtaattttttcactaaatatattaattataatgggaaatatttttaaagtaatgtttcagaaacacaactgaaatggtcatagtatgaaacagctctgtgtttgtatttgactttagggacatgccatttttggttcactgctcttttattttattacaaaaatacaagcaacagatataaagaaagttggggattgtggaactccattttctttttcaataggaagaaaagagtgaagttgtccaagtatgtggatttaatagcaataagctggcttaaaaaagcctgtgaatagttgtagttatcttgaattatcaaggcaaaagaactgttttgataaattttccacatattaaatccatgcatgatagcaatcatatttttagagtgtgagacttaatatgatttatggtactatctttaataaatctgttaagagtttttactttattggaataattttccagaataagtaacattaggggaaaatattaagtttaggaatggatattaaaacttaaaaaccagaatgtttagaagtagataaatgtgaggaaaaaattttcaatggattctggttaattttaatggagttgtataattcaccccaaactgcccataattaaaaagaagcttggatctggctatgaagcatgtgtagttgttggtgttctgttttttgacctgccagatttaacctaattacagtggtggggtttttttgttaagtgttttttgtttttggttttggtttttttttttcgtttcctttaaaatttagtatagattcacagagaagtccaaatgtggggtccataaagcccagaaatgcagaaggatgacatggtgaaccagcaaggcattaaaagtttaacagaggtcctaggaatacaacccaaaagggatgtgaaggacctctttaaggagaaccacaaaccagtgctcaaggaaataagagaggacataaacaaatggaaaaacattccatgctcatggacacaaagaatcaatattgtgaaaatcgccatactgcctaaagtaatttatatattcaatgctatccccatccagctaccattgactttcttcacagaattagaaaaaactactttaaatttcatatggaaccaaaaaagagtctgtatagccaagacaatcctaagcaaaaagaacaaagctggaggcatcatgctacctgactttaaactatactacaaggctacagtaaccaaaacagcatggtactggtaccaaaacaaatatatagaccaatggaacagaacagaggcctcagaaataatgccacatggctgggcacggtggctcacacctgtaatcccaacacttcaggaggccgaggtgggcaggtcacctaaggtcaggagtttgagaccagtctgaccaacatggagtaaccccgtctctactaaaaatataaaattagctgggcgtggtggcccatgcctgtaatcccagccactcgggttgggagtagtacttggctgaggcaggagaatcgcttgaacctgggaggcggaggttgtggtgagccaagatgtgccattgcactccagcctgggcaacaagagcgaaactccttcacaaaaaggaaaaaaaaacaagaaagaatgacacatatctacaaccatctgatctttgacaaacctgacaaaaacaagaaatggggaaatgataccctatttaataaatgatgttgggaaaactggctagccatatgcagaaaactgaaactggaccccttccttataccttatacaaaaagtaattcaagctggattaaagacttaaacataagacctaaaaccataaaaaccctagaaaaaaacttaggcagtaccattcaggacacaagcatgggcaaagacttcatgactaaaacaccaaaagcaacggcaacaaaagccaaaattgacaaatggaataaaattaaagagcttctgcacagcaaaagaaactatcatcagtgaacgggcaacctacagaatgggagaaaatttttgcaatctatccatctgacaaagggctaatatccagaatctacagggaacttaaaacaaatttacaagaaaaaaacaaccccatcaaaaagtggacaaaggatatgaacagacattttctcaaaagaagacatttatgaggccaacaaacatatgaaaaaaaagctcatcatcactgttcattagagaaatgcaaatcaaaaccacaatgagatgccatctcacaccagttagaatggcaatcattaaaaagtcaggaaacaacagatgctggagaggatgtggagaaacaggaatgcttttacactgttggtgggagtgtaaattagttcaaccattgtggaagacagtgtggcaattccttaaggatctagaaccagaaataccatttgatccagtgatcccattactgagtatatacccaaaggattataaatcattctactgtaaagacacatgcacacatatgtttattgcagcactgttcacaatagcaaagacttggaatcaacccaaatgcccatcaatgatagactggataaagaaaatgtggcacatatacaccatggaatactatgcactcataaaaaatgatgagttcatgtcctttgcagggacatggatgaagctggaagccatcattctcagcaaactaacacaggaacagaaaaccaaacactcatgttctcactcataagcgggagttgaacaatgagaacacatggacacagggaggggaacatcgcacaccagggcctgtcggggtgggggggttaggggagggatagcattaggagaaatacctaatgtagatgatgggttgaagggtgcagcaaaccaccatagcacgtgtatacctatgtaacaaacctgcacattctgcacatatatcccagaacttaaaatataataaaaaaaattaacggaggtaatatgtaagcaggataattgatagtcaaccctgtgcatcagttattggactctatgcacatttatagtttctttgaagaaggcatttattcaattttttttaaaaattaaagtaatatgaatagtattttattagctttttcttagtatttatattacattcttgttaagaaatgtacttacagcttgtttatgggtagtttaattcttcaaacatttggtgagaatctgttgtgctaaatagtgtactgtggttgaaacgaaaggaaattttgtcctttggcttgaatattcttttgactcctgaaggcttagtttttaaaacttaaattttgtcttattttaagatttttatggaagaaactggattcacccatccaaaacatttgttaatctgttgctttattatttaagggcaatatagtttaccaatgcaggtccccctacccctgaaaaaaaagtttaaattttacaatgttgattaacatggtattggaattttaaaaactaagaatgtatgccctttccagggaatgatttgactcagcaggatgagggctgtcttagaaataaactaaatttctccatattccatcatatttgttttcacagacatggttgtgacaccttaaattccaggaaaatcttgattacaacattcagcatctccaaaggatgctcaatctatctctagtaattctcaaactgtgagctaagaagaaacatattttgcctagacatcaagtttttgaaattatccccattggcaagttctatctaaggtcctaactaaggaaactctccaagcgttcttgtgctccaagcgcgttgctttctcattgttactatagatgttctcatgcttaaccgcacactctgagtgcccctctcctgaacttcatgttgttattaaagtatcagatctcatttgatatctttacatatgatcacaagaaatgatcaacactggccttttttttctattatgagaccaaattgagcgatatgtataaaacatacaggttacttctttgcttattgccacctacttaacctctttgttttttcttctaggttgtttgatgtgtgcacagtgtcacgaacagacagagaaaccaaactaactttagtgtttgaacatgtcgatcaagacttgaccacttacttggataaagttccagagcctggagtgcccactgaaaccataaaggtatcaagaatcatcttcatgtcttatcaggcagtcgactattatagtctgttaagcaatggctttctttccttatgaaaattgccacaattacaacttttagaattcggtatatagttaaaaaaatcaaagaaaatgttcaaagattgggatatattccagttcatcaactaagtgagatgttcaaagtacagacatatgtattctagttcattaattttagaactaagtggaaaaaaaaacctttagttctaatgcatattaaaattatttaaaaatacttagttgtagattgtcttagaccttaggaaacatagtttagtaagtatagctcagtcttcttctgatggtttattgtctatgagagacataatttgaacattattcatgagcacattgtatattatgattgtataataactccgggacaacctatgctatgtgaatctgaaatattacttgttaggccctccttctttcttcatttttcttattcataaaacgtttatagggaagcctaagtaaccagatactatgccaaactcctgggattcaaagatgattgagacatgctttctatccttagaggtcagtaaactagatgcagtatattgactggaagttcttcctacctttaagtctaatggaaaatgctgctgataaagttttgttgttatttgcattctgcttaactgaacttccccgtagatcttttagatttatacacatcatgtgcgggtcttcatgaaaacctttttgtctgtgtgaattaggtagcttaaacagactcctgccttatcattcgttgtttagaaatgagttatagaattcaccatcattctagatagaagttaatagctaaaaatagtttatcttctcaacagactaagaaatgtctttagtgatagctaaatgacgttctcagatactgactgatacatttagaatttgacatactgaatgatttattccttttgttttagattaatattgtattttttcccatctggctctcattaaagaatctggtgcttaacaatagtcccatttcttcctgagcagtttcaaggacattaaggccctccaaatgtaggtatgcctgatagttacctgttcttggccatcttctgtctgtgcacccctctttcctctggcattctattccacccctgaagctttagttctctcctttatgagtttgtcagaaaccctgtgttcagcatgcagagcagggcatagtcctttttcttatacagttttctaggcaaattggactgctcatcattctcttggtatgatctgtgattttccaccttggtggccttccttctcatgccatttcttttgctccttctcaccaggctatctacctaaatttttcaagtgccgtctcaaaagccatttgatcaactcttatagctagatgtaatctcacatgccttataacacttgttctgcatatctctacctctttatcttgttttctgcctttaattgggattttttaatgtacatatctcatgtattcagtcatcctcatgtcctgacagtgtcttacacaatgatttatacacataggtacaaagtaaataagacacattgtcaagctttctttagatgtaagtattttcaaaattatttttaaaatgactttcaaaggctttaaacatagactatcaaaaaatcattgacattttctgatacatttctaagttcaaagttatttggggagtatcttttttttaaaaaaacagacagatgaggcaaccatatattttatatcttacattaccacctacatagatcttttgagcattatattaaattatcctagtatattggaggctactgagtggaatcatttgcaaaggcatctgtgcagttaaaatgttgataagccagagtggtttactagactcaggtttgatcaggcaggagtagaaatgaattggaatggggggaatctcaagggtgagggtggaggggcaagcaggataggaaaaggaacaggcagaagggtggtcaccaaagtaagaaaggggaggagaagacagggggcagtggctgagccaggatggagctggaggcttgctagaagggggtgattgttgccagaagctcttgaacaaggtgacattaaaagttaatttttttttttttttgagctttttgtctatctccaggaaagggaatgtcacttcattccgtgttgaacagggattgtcctggaggctgttaaatttcttcagccattaggatcagcaccccttgatccaaattgtcagatacgaggtggagttgggggcaaggggctctagttattgaaggtttgtggctaatgttgtattgatgttttcatagtaaaataaaccatagtcaaatgaaatatttcaggcagttaacttacatgttagtggttaatcaaacattttttgctaacttaaaagctaattagaagactcttttatcttcattcttaatttaaaaaaaaaattctgaactatactaacctactttccttccttattaaatataaggttttttaaaaaataatttgagtgtttgtgatgctttaaggtcattgttgaaaacttgaataatcatttaaaagcataataaaaccatcaaatggatagttttaggctgaatatataactgatacaaaattatttttaatcaacactcgtatcttttgtttctgtgattgacttgtttttaagaattggaatgcagaataaacagctgctaagtaggagaatctgaattctggttaattgaaattttaaagcacacagccagagaacagaaatattttgttgttatataggctcatttatgggaagccttaataactagatcaagcaaatattgttattctgaacaacctattgggaacacagaaattgattctttatatagaatgctctgttggaataagagcttctctgactatactcgtacagatatttattgaatattcactctgtgcagggagggttctgtgctaggcagttcagggacacaaaattgaattaggcatgagaaagagaggacctgctctgaaggacctttagagtataagagaagagataaaatgcaaacacaagcctgtggtacacattctgtatggttatttaagtagtttaggggtattttcaagtcaagaacagactacttatgtataagtaagcacagtctatattgtgccaaactattttttaaaatacttaaatttaaattacttttcaaaggatccaaatcataggtattaatattgacattgtcttgcatagattaaaacgtatcatgttgttaaataattatacatatctaagatatttttatttttttttgagacggagtcacgtgtctaagatattttatttttatttatttttttttttttgagacggagtcacatatctaagatactttatttttatttatttattttatttattttttttttttgagacggagtcaccaggctggagtgcagtggcgcgatctcaactcactgcaacctccacctcccaggttcaagcgattctcctgcctcagcctcctgagtagctgggattacaggcacgggccaccacgcatggctaattttgtatttttagtagagactgggtttcaccatgttagtcaggctggtctcgaactactgacctcgagatccgcccacctcttggcctcccaaagtgctgggattacaggcatgagctaccatgcctggccagatattttaacatgaaatatatataaaatagaaaatcaaaacaagacctcatctaagatcatttaagctcaggggattttcctctacccactttcctctacccagtgttgtgttttctgtggcactgtttaccagttaacaggccactgaaactcaggatattctaatgcacattcaggacataaattgcattagttgggcagtacttggataaaactaggatgctccatggtgtcttactagatatcataggggtaacatcattttgcttatcatttcatcaacacgtttgttagaaaagagcccatgatgatcttacttttctagcttacttatatcacctaacagtttttgaagtgcacttaagtgccatttgttttcgaaaaataaaaaagacattaaaccacaccataagccataagtactaataaaggttgatagttgggtaaacttattggggaaactctaattattgcacggtgctcatgtgggactttaataaagtacattaagagtataggcctgaactgaaaattttcattgagaagttcatgagaataaaataaaatcataggtgattctttccaacatcattaaatataccttattctaaaaaaaaaaaaaaaaaaaaaaagcatacatagaaatcacattcatacttcatcttggggttttcatcacattatttaacctcttttcttgatgtcctttaggtgcatccattcttggttgacaatgacatttgcataaagcagcctgttggctgctgtcctgtgaagtcaacagatattctaattttccctcatagacttattgttgacatatctggctttcctctttctaattcaggatattatctttgggtctgtttacttgtggaggagttcagtgccatctttattaaatttttattggctcatttgagatttaatattgccttcctgggtttccatgctgagatttatgaggcaataattgacaccttaatgattgtgttattttttcttttagagtacgtgataaattcagagtatctatgcttatatagcaccttccatttatggagctttatgagaaaaaaaaacagctctcagatttttatttttctctttcatgctttcatctgccatcctatgagagagggtcagaaagaactgtaaagaaatttgctcaccatttttcttagtaatttgtaactgccacccagaataagaactgtacactgcaagatacagatggagagagactcttatgtaaaatattctcctgtacaggcttttccaaatgtaatgccctcttttactaaatcattcatttggtatttagtcttgtctgtataatacattaatctttcctaggatatgacctggcttctcaactattttataaactctttgaaaacctaaaattattctgtggacattctgtgcatgaaacatgtttgataaaaaaaaatgtttgatgcaattgtcaatatagtttcacaagtttgaggcactgaaaggtcacacaaaagaacagcagcctctaaaataggacagggttctttgagctcaagaccatatggcctcttttgatgattcaatcttggaataaaattttttttatttatgtatctttatgataaatgaattctatagagcttgagagggccagaaaagctccaggttcatgtctgtgtgggtcgttttctctgtgaattagatttcattttatcttcaattgaatgtttcttagagttttctattggttgtaatatttttagtaagagataaaacacactattaggtttattttacaaaacccagacttcagaaactgacacacactgttaatagcacctgttttttgcctctgggaaatgtctgttttcatgaataatatctgcttgcagtaaacagtggctctgatgtcagtatgggatgcccagggctgattcatctttctcagtttgacataatgcaaagtgactgactggtccctgtactgcagatgaggaaagcctctcagatcttcttctcttctcactcctaaaggaatcaagccatggcccctctcagctcctggtggtctccattttgcctgaattacgagcaggtgatttgtctcatctttgcaggacacagagcaaattaacatgaaaatatcgcttcccagaaaacaaggcaggcttgaatgccctgtcgctgctggtcattagccatctgccaccgacactcatactctgtttatcacatttgaaattcagagcagatgttgcataataaggtgatcccaaaaacaaggcaagaaattcaaagaacaaatactctaccataatgataaagatcttggaaggaaatttttttcaatctaatatcatagctgcactaattgaatagaccatgtttttaaaaacacacacacatctctcctggtatttgatgcaaactacttttcatagtaacaggaaataattttaaaaagaaagtacatttgtgaaagacacctgagaggactgttcaataaagtctctttaaagaagcaaagtcgaatgttggaataacatagttctggtttaaaagacctcatagatcagtgatgccatcttttactgtaagatgggccttaacctacagcaatttgacttaaaatagttcactcctcacagtatagtagatctttcaaggcttttaacttgcgaacgtggtttcccagtttattttctttttggcactcaagaccctgtgttttctatatcctttgttttcactgtttacccctctacaaactcccaccaccgctatcagcctcccaccttcagcatcccttgtctctccagaactctgccccagcttaccctggccttaggctctctccaacctgagtcccaagattctttcatttttagttcttctgcccttctccattaatgtagctttttacagtattggttattataatgttttacctagttgatttatgcacattgtagacccttattatgccttattcaaagtatatcacttatagtatattaactatggtgtttagagacattctgttttttttaaaaaacaggcatccaaacttttaccaggaatgtgacctatattctgtggaagacgagcttttaatatagtcttttgactccaaagaaatattttctccacagaaaccacaactttactgcccctccccactctgcacccctctgcccccacacatactgagagttttgaaatttggggtttttttttaaagactatactgctaagcaaaaattaagcagccagcctgagagtagacagggggataaatcaaagcagtgccagcagctgaccactgagtggaataggagagatgatttgaaggatggaagaatagtgagtcaatactgagtatattccaaattcagggggaaatgtagagtgagtgagctctaacaactgtgggagtttatactactaaagtcagaagcccagatctaaagtgtagagagaaataaaatcttcagtgtaacctttctaattagtaagatttcagtgtaatcttactaataatttccatttgtttccctctgctccaatcaggaacatacatattgtgctttcaagtatctttcattccaagggaaaactcagtaactcaagcaacttcttaaaggagaacatttttatgcagtctagattctgaagactctcagaaataaatccttttgcaaattcctaacccttatagtagctgaaaatatcagaagagaaagaggacagaattatgcatgtgtatgtatcctaacaaaaaatataacagctatttagtaggttttttaaaatctccaatcctataaaaagctacattaatgtaaaagagcagcagaactaaaaatgaaagaatcttgggacttaggttggagacagcctaaagccagggactaaaaggaagctggggcagagctatgcagagccaagggaacctttggtggggtacagggggttgatagtggtggtagggggataggaaatatgggtttaagaaaagctagtttctttctaaaggtactgtaagactgactcactaaataaataatgactcactaaataggcaaatgacacttagattcagctaataacagataagttagaatctctttagaaaatgcttcctcaccctaggcattgaatctgtttacaaagtccattaaaacttgcaggtagtatatacccgtttatatcaccatggcaacagatagcagagtgctcttctgcgtagaaggaaggctatttctcatctaaatttagcctgtgctaaactccttggttgcagtctctttttttggctcttcttcctctaaacatgggaacatccaaggcttcactgtcagccttcttcttttccttggctacactttctaatcaagtgatgtcatttagtccagaatcttcaaatacctattctccagcctgacgtctcccacatgctcttggtacagatagtcagctaaccatgtaaaacattgaccgagaatcctctgccaaactcaagccttccctatctgccagttgtttgagccccaagtttaggcataattcttgattttttgctttccttcacagtcttcatccaatccatcagtaagtgcttttggtgttatccccaaaagatatccccaatctgactacttctcaatatcttcattgctatagttctagtttaacccatcaaccagcttcctaactcaacacaccacttctgctcctgcccctttatggaccatcctctgtataacaaccagagggaccttattaaagcagaaataaaattatctaacttccctactgaaaacttagctccagtggtttctcatgacctgtagaataaaatcagaagtcctacatgatctagtgctccccaccccctgcctttctgatctgcctccactcttccttgggcccacggttctccagccacagtggccttctttctgttcctccagcttgcttctagctcggcatttgtccgtgctgatttttcatctgtttggaatgctccacaccctctagctcatgtcatgtcttcatcattccttctctgaccctctcagctacaactccacatctagttatagtttatcacattacaccacattatcctattttatcttcttcttcatagcacttagctgaaattatctcatttattttttatgtttgttttttaatctttcccaactagatgagactttaagtcaagactctagtccattgcactagctccagggccagcatactgcctggaacataggggatcctcagtaaacatgtgtttgtaactgtactaggtgtttatcttctaattaactcagaaatgtatgcatcaataccaccattgtacaagccaggaaatggtactttttcaaggataaaatttttaaatatttatattacagaaaaataagctgaaggtatgttgtatcttggcacattcactttgcacttgcgcattcagttctctgtggtgggccgggattctgggattatctgtgttgtagctaagaatatagcttggtttagaaatagtctaaaaccaataactgatcctaccaaaactataagatatattctccttaaaatagtactaattccaaaaatactaactgaattccagaaattgttcttccccggggtgggacgcttaaatatgttttataccaaggatggagaactaagctcagtgaagagacggatggatgtcatgaattttagaccctattctcgtatctcaggagtatatatctaaaaaataattttgtagtgatacatgtttttcattttaaaattactttccctatatcccaattgtatgctgtcttccccattcccatcacgagaactagaagcttcaaaggaataagttatttttttaaatctttgaagtactatactatatttattcatttggattttatcattcttacccagaaatttcagatgcccatatatattaagttgaaaaaaaggaccattctactagagcaattgccaacaatttgcaatattgtcattacaaaattttaaatcagtgaaaggcatacaaagtaggtatccatcagttatctgagatagtatcttattcctcattcctaagcaaggtggaaaaaattaaacaatcgtttcattgcagttaagtaagtaattactggttctagtaagtaattgttgaatgaatatgtggtttcacaaaaagttgtataatgaagccttgcaaaccccatagtgccagttatgagaatctggtgtcttcagtatgtagaataatgttgtagttactgtcattctgttcttcctcttcctcatcatcaccctctagaagcaaaattgtcctgaaagattgattcttacggtaaatcaagtgaggaggagaggttggcctgaatatggattcatatatttaattaaggacttagcatctgggcactgtgacacttggagtttagggagtaaaagagaattccttgaatgtcagaaatgacaaagtgggctgggcgcagtggtgcacacctgttatcccaacactctaggagaccaaggaggacgcatcacttgagcccaggaattcaacaatatggcaaaacatggagaaaccctgtcttgacaaaaaatacaaaaattagccaggtgttgtggtgcatacctatagtcccagctgctcaggagactgaggtgggaggattgcttgggcctgggagattcaggttgcagcgaaccatgatcacacccctgcacagcagcctgggtgacagagcacaagaccttgcctcaaaaaaaaaaaaaaagacaaataaaccttggctactaccatgtaatggttagattaattaggatgcctggaaaatggactaaacccaacaggttttttttttaaacccaacagattttgcaaaaatgagtaactatctaataaagggttgataaaggctttgtaaacactatgctttgtttctccaagtgtggtcagtgaatcaaccacctggggtgctcacttaaaatgacaatcctgccctaactgattcctcattgtcaaacatagtctcaggagggagtttctaataagtaccctctggtgacaccagacactgcagcttaagacatactcccaacccccgcagtatgtcatatgacacaagtgggaaatggaaaacatctcccttacattctgagatgactcagacatctggaatatttgcttgcctgtgcattggtaaccccagccaatcagtaggtttaggcaatctaagcccaggtgaagtcaggtgtggtgctttactaacgtcattgatatgtaggaaatttgtttaaaggcactgaagttttattccttaaaatgttctattgaaaaatacttactcattaataggagatataaattaaagagatgcttaggaataggagaattccaactaaaaatttttaagccacacaaaaatctttcctttaaaaaagtgttcatcactcattcatgatttgacctttgaaagttgctatttgtttcatatacactaatgatttaacagttctctagggtcttaaattagtaaaccattaccagacttgcaagtgtaatgggtcagaattcctactcctgttttattggtaaggaaccaaaactatattaaatttaaatatatcatagtcataggtttttagtgctgacaccaatgtggctaaacctagtactctgaggctcatatattgaaagccatgagtactcagaatctaattttcttctaattgtcattctaggcctttagcaaatttaagctagcagttttgctgatttttatattaccagtgttcactgttgtcactggccatacttgttaattttttatttcttggccaaaaccaaagaaaatatttatcattctactgtagtatagtcataccacttttagattagaatgttaaaccaaatgtagcaaagattggggactgcaaggcataaaataatgtttaggaactgcaacattaaaagataagtttactattaagcaatcagatttagatcaatctggaaatagctatcctcaatttaagatgttctaggccgggcgcggtggctcacgcctgtaatcccagcactttgggagattgaggtgggtggatcacaaggtcaagagttcaagaccagcttggccagtatggtgaaacctcgtctctactaaaaatacaaaaaaaaaattagctgggcatggtggcacatgcctgtaatctcagctgcttgggaggccgaggcaggagaattgcttgaatccgggaggcagaggttgcagtgagccgagattgtgccactgcgctacagcctgggtgacagagcgagattccatctcaaaaaaaaaaaaaaaggtgttctatgaatacggttagtatggaataaacacttgttaaaattttaatttcactaatatatcatatgttaatatttaagtctggaactgagaaattcaccattactcatagctgaagacttgaaatgtttgttgagactaagatggtataaaagctatgagtgagggccctgcttccctctgcttccttcctctaccaaaatatattccgggtcgggaggatggggttcaagaatagggaagaaataggttggtgatcacaggaagagaattggttgaatgagtcacaaaaaagaaggagagatttatttaccataaataaaccaaaaagaaagtgcttttttaaaaagcatgtgattatgctgagtgtaagtgcctgaaacattacattgctaattcttgtcccccccattatgattattactctgatcatagcaattgatcttgtaaacctcaagtcctttaatatttcaaccagaaactaaagatgagttgacttatatctttagtacaaaactatgtaaattgaaataaacaccacagaaggacataaatatcagttaagttttgtctttgacatcatcttttcttaatgttgccactatactaacagcccatgatatgcatcttatctttgctgcaaaatcctaataaaaacacttgggaacttggaaggaagtaaaacacaaattacattagagtgaattaagaaaaagagttgcattttggtatcctcccaagtggggagatttatgagagcatcacacatgaagagaaaggacttcttttttgtttcaactccaccatcactttctccacagtttcactggacttcttactttatttatcaccaagttctataattaacatatggttcatgttattgatttctcaggtttcaaagtaaaataaattgagctttcttccacatttagaatatacagtttttttaaggaactctaaacaaaggcacacattatttgtaagttggagagcagctgccagaaaacagaaaattaggaatggagtcatgagtgaaataatggagatactgttcagaggtaaccctttgtacagcaggaaattttccttagaaaagaagacagctgagtttgcttgtaaattttgctagaaacaggcctgatttagtaacatttagtgctggttaggaggctgaagacaacactttcagctttggataccaaacgagtggcctgttttatattttgtacacagtctaaatactttatagtttcaaaagatatgtgtgtaggagagagctattattaattttttaaatgatataataatatgtaaacaaatatttttcagatctggtagtagagttttctaagtgcgaaacagtagaaaatatcgcaaaggaaatgattcatgcattagactataaaaattttagactgaaaatattataaataaaactaaaaagcaaatgataaaatatttgcaaaaactatggcaaaggtttaatatccttaatatataaaaagctcttacaaaccactaagaaaaaggagattacccagtttagatatggataagaacatgaacaaatttgcaaagatgtacatatatacagaacgctggtagacatgggaaatgctcaacctcccaaataattagagaaatgaacaataaaaaaatgtaccataggggatgattaaatacattatgaaaatttatctagcaaaatgaatacatctcataggatgatttttcaaaaaatctcatattgttgaagaataattgcctaaagaaatacatatatacaatatgatcccattttgggaatgtatttcaaatacatatattaaaaaactagcatgaaattattaacagtatatatctctgtcagggtattatgggttccttataatttattgtttacaatgggttagtgccatacaacattaaaaccctttgacattcccaataattgactggttttgccctacaaaaatgacagtttcatataattcaacccaatatttttataatccaacaaaaggctgttttagcatacatcttattggggaatgccctctattacagaaaagttgaagttctcacatctgaatctttatagcccaacataagaattaacaacatagtgtcacttcctttgctcttaggcaacacaaagggacaggttttgtaaaataatcagtgtgtatacattaaaaacattcagtacatgtttactgatgatgatgatattgataaaatagcaaacattgaaggactaggaaaaatgatatgataagttttctaatgagatttattgacaccattgttatctcctttagtcttacaaacattttaccattaaatagtataattgggctatggagaaatttcacttgattgtaaatggaagcaattgctgatgagagtaaatttttaaattaatgtctgtgtacagaatacagtaaagttgcaagcctatttttactacaatgacagttactgatacagggatttctgtaacaatctctaggctttcaatacttttaaaatcctggattagcaggtacagggagattgtccgtgaatagataagatattatgaatgctgaattggtttaatgaagcagtgttagatgtctttccattttcagtttttcttgaagcaaaatatttaatttgagacttgaagtgctaacagcaatcttcattgtatgtgcatggccatacagcaacatgtttgtatataactccactgtccactcaaggacaatatacatttctttcaaattaaatgggataaaaggggaaagtgatgccaaacaaagggaatttgtgtgtatggtttttttttaagctttcttttttctttttttttttttttttttgccttaaagtctgttgttccatcctactgtggccttttgaaagtatgaaggtgaaaatagaccagtatggataacagtaaatgaaaactgctgaggacacatcacttgcagaaagataaatacccatagttttggtaatgcccctgttggatttagaaaactggccccaccacacacattttttaaaaaaaataacttttatcccagaccaaatcatttctatagtagctaaaattggtgtgttccagactcgtcctgtgagcctatatgccatcaaagcagatacacttaaggtggaggcagcaagccctgatgctaatctgaaacacaggttaaaggagagtcctatttcactaagacagaaaccactaagcttttttgcctccagccaaaataacaaagtcctagcctttggtgattgatgagcatgttgccaggggaaatggactggaaaatcatcgccttgtcttttacttgccacaggaaagccataacagagatctctattcttcttgttctgataagagacctaaggaagcatgaagaagggctaagaagcctgggtgtgtgttatattcagctgcttgctggattgccttttaaaatacaatttgtagttccctaactcacaaatagaacatggatagttggctagcctttgacaagccatgcagctttttaaccacagcttcagcaaagttttggggtataaaatcagtgtaccaaaatcgttagcattcctatacaccaccaacagacaagccaagagccaaatcaggaaggccagatcccattcacaattgccacaaaaagaacaaaatacctaggaatacagctaaccagggaggtgaaaaatctctgcaatgaaaattacaaaacactgctcaaagaaatcagagatgacacaaacaaatggaaaaacatcccatgctcatggataggaagaattgatatcattaaaatggacatactgcccaagacaatttacagaatcaatgctgttcctattaaactaccaaagacattcttcacagaactaggagaaaaactattttcaaattcatatggaatcaaaacagagcctgaatagccaaggcaatcctaagcaaaaagaacaaagctggaggcatcatgctaccgaacttcaaatgatactacagggctgcagtaaccaaagcagcacggtactggtacaaaaacagacacatagaccaatggaacagaatagagagcccagaaatgaggccacacacatatgaccatctgcccttccacaaacctgacaaaaacaagcaatggggaaaagattctctattcagtaaagggtgctggaataactggctagccatatgcagaagattgaaactataccccttctttacatcatatacaaaaatcaactcaagagggattaaagacttacatgtaaaacccaaaactataaaaaccctggaagacagcctaggcaataccatccttgacataggaatgggcaaagatttcatgtcaaagacaccaaaagcaaaaattgacaagtgagctctaattaagtttatgagctctgcacagcaaaagaaactatcacagagtaaacagacaacaccctacagattgggagaaaatatttgcaaactgtgcatctgacaaaggtataatatccagcatctgtaaggaaattaaacaaatttacaagataaaaaaattaaaaagtgggcaaaggatatgaacagacacttctcaaaagatgatatacatgtggtcaacaagcatatttaaaaaaagcttaatatcactgatcattagagaaatgcagaccaaacccacaatgagttaccatctcacaccagtcagaatggctattattaaaaagtcacaaaatagcagatgctggcaaggttgtagagaaaagggaacactatacactgttggtgggagtgtaaattagttcaaccattgtggaaatcagtgtggcggttcctcaaagagctaaaagcagaactaccattcgacccagcaatccctttactgggtgtatacccagaggaataatgaatcattctaccataaagacacatgcatgtgaatgttcattgcagcactattcataataacaaagacatggaatcaacgtaaatgcccatcagtgacagactggataaagaaaatgtggtacatatacaccatggaatactatgcagccataaaaatgaacaagatcatgtattttgcaggaacatggatagaactggaggccattatccttagcaaactgatgaaggaacagaaaaccaaatactgcatgtcctcacttgtaagtgggagctaaatgatgagaacttatgaacacaaagaagggaacaacagacactggagtctacttgagggtggaaggtaggagaagggagaggagcagaaaagataactgttcagtactgggcttaataccttggtgatgaaataatctgtacaacagactcctgtgacacaagtttacctatataaaaaatcttcacatgtacccccaaacctaaaataaaagttaaaaatcaatattacagtactttgttatcagaaagcacagatccttaaagactatattggcagtgaacttttttaaaaggctcgggttgcattatatagtatattttggaaatgtatttgtttaagagattagcatttccaattccatgacttcttcctttgtgtttttttccaggcctgtgtttcagttctgggttagaaacattttaaacctttcctaaattcagtagctctctcacaaattatatttagaaaagaaaagccccaccaaagttattcccagatcccttatccagtggaggtgggtatgcatactccgtttcttccccctctggtcttgcgcttcttgcccaattgaaatggagaattttgttaatcccatttgttattggaaagatagattgcctgtccctttaacaggatggccaaagaatgacaatcctgagcccaccactctaatgttgcattggaagagttcccctggaagtagaagcatacatcttccttctattaataccaacagtgaacctgatacaactctttaagttattgcagtctcttctcttttattctccaacaaatgagagccctgtctaacctagatctaaacctacattgttcattgactgaattccctggcttctgtgagggttccttattttcccagaaactgggtaaagccgattcacatcaactggttaaaactttgaatagaagaaaaagtgaattaaatagattcttgtttttatgagcttctccactacttcagagcagcaaaatttcactacatgccatgcccagccacaaaattgaggagcctgtttgttgtgcctttttgaaatggccttagggcttcccaaatttgttgtaaaaatcttaccaatgtaattttcccattacacctttcccccttttctccttaaacttgacttttgagttgtacacaagatcatagttaggtgagttttttgctgggtctttttttctttttttttttacaattttacatgcctctattcactcatctgtgcctaaatcagcagggcctaatctataacagagccacctttttaagtgaccgccagctgagtttgatcccttattatattaaagggagaaagtggactttgccaaggttggggcagattctccaaccttgcaaaacgttgtgggcaattaatgggcttgaacatgaggttcttttgtgtgtgtgtttgtatgtgcacttgtatgtgcaagaaagagtgaaagagatacccatgcatagaatttttaaaccgggcagctctgtggtagttagctagaggcaagagataccctgttggctcccagaccttcctggaagctgactgttggaaaagactccttggagataaatctcatgtggttcccttttgcctgaatggtatccgcaccccaacttataccttaggaggctttggaagaggaatactttttatatctaatgcactttggagattggagtcctgcagcaatttgccactcaggaaaataaactagcatattaactcccagcaaatgccacctccttggtttgaagcggtttgtaaagcattttcttcctggtttgtgcgcaccacattgtttcagctcctctcatcactgaccagctggcttgttggtgaatagagctgtgggcccctcgccatgtttcatgtgaggtcttggctgggtggcaaacaggcagcctgtagccagtgtcagcaattcaggaggaattggcacagcagtgtccccattaatttctgcttgtcacatactgtcatgcaagttacaccagagaggaaatgaccgttaaaaaaaaaaggtacccttgtggcactgggtcccctccagacgttccccgaggttaaacaagtggatacaattagccctacacagacagctgcggggaaaggaaagcctagaagtgggccccacagcaatgtgtctttcctgttagcaaggagtgtcggctatcaacatctgccatattttaacccttcaaagggaccagtaaattaaggggagctattatcccacgctctgctgatcattatcaatcataatgccttgggaaattaccacagtgctgctgccttggtggcaggttttgtcctttgggggatcgtttttatgtttttgctgagagcagagaagagtggtagggccaagagggtgaaaggaaatggactctgttaattgttggtaatttactgccacagggaaggggactagagcggcaataaactcctcctcagctcaaactgaagtagttaaaattggtgggctccagacggcttccatttccagaaagatccatcttgctgactgtcaacccttctttaccacaagctatggtgacttttagggagcacaaacaagaagagactttgggaaatgagaaccagttatagaggagaaaggcaatccaagatgagaaaagaaactctaaaatacaggcttccaaaaactgttgttttattttttaaagattgaattaagctgctgttatccaaatagagtcctgactaacctttataagcacatactgtgctttggagtggctttgtctagtgaaattctgattaccagcacagagggatgggtgactgagatggtcctgtgtgaaattatgtttgttccaacttactcaattgaactaatcattaaaactgtttacagaaagaatgggggaaaagaatggtttcttaccatgttttaacttcaacaggttttgcgttcatttatgtagacctggaactttctcctctgaaaagagaccattttgctttgggggcataaaaatgacaggagttctgaaaatgatcaatactaatgagtacaggaaaatgagctgatgttcatctaaatgattgcaccaaagacaatgcagtgcagggaataatcatcttctgattttactgagatgcttcctgaatgttactgaggaagatgctggcaccatttaaaatatttaagtgagggatagaagcaaccattaggataattgagtggaagtaacagtgttactgtgtttattgagacttcatctcttcctgtgtggaagaagtgacaggatcaccaagcagagcctggagagattgtcagtgatgaatgttagggctgttcccatcctatgacattatctagtctgagaccctcattgtatatgttagaaaacagaaatcagaggttagggacttgtctatgatctcacaatgaagcagaggtggaacacaaggtttccattcccaggtgaactgtttatatcattccatgagctgactcagcacaggagttatgaccaatactagcagcaacaaaggggtcctcctacctcattgaaagcagggagtaggaatgaaccacaaatctgaggtagaaacggctttcttcaatacttctgccatgatgtcaggcaggaaacttgaggcaccagttttagttggccctcttagagcaagagatgccaatttcaaaaggtagtcttcttactagctgggcgtggtggtgtgcacctgtaatcccagctactcgggaggctgaggcaggagaatcgcttgaacccaggaggcagaggttgcagtgagccgaggttgcaccactgcactccagcctgggcgacagagcaagactccgtctcaaaaataaataaataaataagataatcttcttatgcaattttaagtatatctaaaaattgagaaataaaagtatttctcaaaataatgtgtagattctgagaaatttgcctcattcggtatttataatttttcaaatgttagatcacaaaggaaaatcagtaaggtacacataaatgcgagccctcatgagtatgggctcaatcactaattatgggatctctggtcttacagatgggtagactgtaaatgatttttcatctactcttgttgctgatctctgattttaggggatcatcagtaattgaattctatttgagattaaatccacttctgaacatcaggttgtgacatttattaagttattaaatcatatgcttcagtattcacaggtgaagcatataatttaataacttaataaggtcacaatttgatgttcagaagtagatttaatcaccataaagtaggttgtttctttggttaaatatgaaaatatagagaaagtaaataaattaggcttgcttcatgtttaaaaagcattattatttcagaattgtttctttggcctaatttcaggatctgtcgtataatgtcaggcttcagttgaagcagttacctgaagattgtgtagactctagaggaataccagaggattggaaataggaatagcagagaaaataccaatttagtgaacaatgatgagccaattagacaaaaaaaacattggcttgaacttcatgggaaggcaccgaatcattactaactcctgtggtattcagaataataacatcaatcatgatgaactgctttggtagtcatatgtctgtatgtaattccataaaaattctcttagttttggcattaattaatagtgactgtattttataaaatggcgtatttcattgaaaacacttacgtttaaacatgtcatctaagaacttgaaaatctttcctaacatgcattaaaatgataattactgagttctcatgggaaaaagtagtttctcattttaggtcccaaagtttcaacagcatttggtatagcatttcatttcacttgtggtcctaatgactcactgcattcttttcaccagaacttatcccctgtttactctcagagttctgtctcatgtagacacaagcctagtagtgaatcaataacatgactattttcatgaacagtggaatagttcaacctctgcaatgccattggaagacattgtctagtctgcaagtttaaggaaatttaacatttcctatacctttatatcttgattgggtttggcttttttttaaagattaaactctgagggaaacttctcaaagctgagcctaggacattctcatgcagttgggaagcagcactgtccttattttacagatggaggcagctggcataaatagctacttaatgatttgcccaagttcacacaagtatagagccaggagctagatttgtgactcttgcacaacccattagactgttttcatttcatctaagtcaccatagtagaattaaatataatttttatatctttgtcagtgctctttaatgagttaactcctacttaacataaatgttttagcatttccgtgccctctgggccattaaggtaatttatttttataattttaattattataatcctcttaagtgtataaaataaattcagaaatgaaatgaagacatatatttaattgtattattattaaaccacatggtataaatgataggattcagaaataaaagtttttcattagattttggccattcataaaatatattgttgtttgcttaacatccctaaaattattttcagagttaaggagaatatactcttatcactgcatatttactttacaaccattgaggaatacatactgtgtgctttacaaagatacagcctaatttatttgcaaaaagttaataaaactgcgtatgtgataacagtttttatgctgtttcctcacagatctctgttaattgttacctgtttatggttacttttgctgtattgttatcattgaattaggatagtctccagttaaattatcttctctccaatgaaaaaatcctgcttaaaaaaaatctgagggtatgatgtacaacttttacacatgatacatgaactttaacacaattgtgaattagagcccaacttagttcaagacaaaatgtatctcgaacacttcttttcttcttaaaatatcagcaataatctagtatccaaagtaggagattcatcatcaccttaagacttcttagcagtttttcttgtgtgacaaaatattttacacctttatttgagaacaaaggaagattatgagagaccactagaaatggaattttagcatttcgaaggaatttttatatgacgttgttcctcttggcaattcagaaagcactccaggaatttgtctagttagtgttttgtatatattagaatctgtgtctatttcctttgtaaaaaaatacgaagacctcccaagtcataacttttattatcaattcttgtaatgatcaaatatgacgtctgtacaggaaataaatcgtgtagtagtttagctggtaatccatgttctgcctcaaaacctaggaatgaatggcttattagctgttgaaaactctgtcattaagtatcattaaatcctttttttaaaaacttcctttatgccaggtaaatttttatattgcgaaaactgaattaagccaaagaaaggcttgcaaaaaccaattcagatcacactgtgactataacaagacattttcaaaaccagcattccagttgttctgtcaggtcattccatcaggtctcaaaaggtgactaggatgctgaaaaaggtttgccttccacattgtgacgtaaattcatttatttgtgttacttttgtttagaaatggcttgttacaataaggttttatcactgtgactcatagatcatgtaaagtcagcccattcccgttttactctttcttgtaattttcaaaatatggcgtagtggcaacccaaattgaaatcttgagaagctggcaaggttgatcaaagtggaatccacaaattaggattgtaaccaaaactggaggaatcatttttaacctactcaggaggccattttagagtcctgaaggtatcacttatacacaaatcagtgaaattataacatttttagagttggaaaattccttggaatatatgtagcccagcctctccccactttatgtttaaggaagtgggtcccgaagagggtggtgagttgcccaaagtcatgcagttagtactgtgctaggactgtaaccaagttcctattattctagttcggtggactttccaaaagccatataaatgtgtttttctcactcatgtagaattatttcctagaataaagacctatatttaaaacatcttattactggtttgaatgtgttactatacttgcttgtacattgctctaaaaacaatgttagtttgaactttgccctcatttgactgacctaccccagaatcagtaatgctctcttcactagaactttcattcttaacattttattctcctcaactagagcctcattccaagtacagtatatattttttctccatgaagaattgtaatcatttatgtctctgcatttcatttcagtagtgctcactatgcactatcaaagttattatcctatttccctggtaatcacttgcgtatttgtcaaataagggtgtatgttgaataaacatgtggcttttattcaatttggtaaacatttattgcataccctcacaggactaaagaaggctacaaatcagtacagcagaatgccttcaaaaacttacaggacacacccaccaagtgctgcagagcagtcagaagttccctatgagatataagtggaaaagaggttcagaggatcaaaaatgtacatgtgattataggaatgagaatttgatatgaataccctgaagaatttcaggtttggttttggacattggcatctgttttttctcagttgatcttttgtttgtttggttttggtttttggtttgtttttgtttttgtcagacagagacatttccattactcaggctagaatgcaatggtgagatcatagctcactgcagccttgaactcctgggctgaagcaatcctcccaagtagctgaaactacaggtgcacactaccacaccaagctaactttttaattttttttgtagagacagggtctcgctatgttgcccaggctaatttcaaactcctgggcctaggcaattctcctggctcagcctcccaaagtgctgggatttctttttttttttttttttttaggcagagtctccctctgttacccaggctgtagtgcagtggtgtgatctcagctcaccacaacctccgcctcccaggttcaagcaattctcctgcctcagccccccgagtagctgggattacaggcatgcgccaccacgcctggctaagttttgtatttttagtagagatggtgtttcaccatgttggtcaggctagtctcaaactcctgaccttgtgatatgcccacctcggcctcccacatgctgggattacaggtgtgagccatcgcgcccagccgtgttgggatttcaggcatgtgccaccacccctggctcacttgatcttaagttgcaaaatcacattcattaattctataggtgtggatggggaatgggagtgggatatgagtagtcatatatttgccttccatggggcctcaggaagcagtgcctcaactagatttaaggaagtactgtagtactgagaggtcttaaggccaaaagacaccatctgcttatttcattttatttattctatgttatgaaagagagtccctagcaacaagacacctggttactagccatgtgacttgagcaagtcacttgacttttctgagccctagttttcttatccataaaacaaggattaaaatatgcaagtcaaatgagttaaaatgtagaaagtattttgtagacagttcagcattctatgatataaaggatggagattcttctcttgtgtattttctagttacgtccatgtgcttttcaactgatcatagaactataccaagggtctgaccagtaataatactggcatatcaaaattgcctaaagtgatgtcagctagattttgcatggagcctttaatggcccgccaaaatgacttgatctacttggtgtccctaaaggcctttcttccttctggtttgagcgtttgttgactataaaatgccttttttgcatttcctgctccttcttgctgatgatataatagttgcttcttgaaatactattgaaaatcttcagattctctggaaagccatattctgtaacctgttatctgtaaaagttctgagtatagaacatgcagtatgccattagaacacacaataagtttagagatttaattttaagaattttccattgtgtattgaaacacttaaaaagtaaaagccctgggaataatatagtatattaccatctgcgcattttccctcaattctttcctgatggtagctgatgaaattgaaatggtaatttttagaatgttctaatatttgatgtatttaaaatacatcaccttttattggcctgctttatatgggaacaagaaagcctacctagcaaagaaatacaacctagttttatatcttatttattctgtaagtccttgtgcagcagcatgttaatgtggacacacagcttgtagataatttaaaatctagaaagggagaatgagatacatagagaaatagccaccacataaggcagtttatgacgaatacagtgtgttacaaatgacaaaagccacaggaattcagaagagggaaaaataaggactggcttcctaaagaaagtggcaatttttttagaatattgaagctgttactctgaggcatgagtgacacaagccagcagaagccagagatttgaagtcttgctcaagatttgctggtttccacttggggaaagacaccattaggctgggtacatctggagagatgagtgcaagaagccagttaagcaggagagaagtggacttgattgtggaggcactgtgtttcaaactcaaattaggcagctcttgggtgggtggctgataccattgttgtgttttcagctgattaatctggtagcagtgtgctcgtttaggagaaattacaacaggagatcagtcaaagagaatggtcctctggtttgggaatgaaataatcagggcctgtacctggagtggggcaatgatgattaattggaaggaaatgagaaattgagaagacttgacaggacttggttactcattgtccggagtaaaggaaaagcagaaataggtaagttaattatcagtttggggaaggtgattatatagtttagtcttgttgaatttggcctggaataggaaggtatatctcagggcactgcaataacttgtggctgcaacttctgagccccatgtaacctttgaggagtcatggaatctaggagaggtgccacaatactagaagtgagaaatattctgtgtttttttaaagataggaaaaagatagattctacaaaatacaatccagcaaaattgatactgattttaggttattaaaataataagttgtgagcatatagaaaaataactggttaagaagtatgaaaaaatgcccaaatctcactacaataagagaaatgaaaagtaaaatgatagtaaatatttcccccatcatattgaggcaagcaaaaaaaataaaaagttttataatgtcaggtgttggtgagactgttaagaaatggatagtctcgtacaccaactgttgggattataaattggaacagattgagtatctcttatctgaaatgcttaggaccagaactgtgttttggattttgtattttttcagattttggaatatttgtgtatatataatgagacatctttgggataggtcccaagtctaaacacaaaattatttttcatttatgctttatacacatagcctgaaggtaattttatacaatatttatacttctgtgcatgaaacaaagtttgtgttaagtacttaaacgtggaattttccacttgtgacatcatgttggcattcaagaggttttagattttggagcattttggattttggattttcagattagggatgctttgcctttaaagcattttggaggtaatctggaagtatcttttaatattaaaaatacatatgttcagcgactgagacttctcacttctcagagaaatcctggtacaagggcaaaaggaggcatgaataagaaaatttgctgtagcattaattataatggaaaaaatggaaataatctaagttcattagtagagggatggctgaatagactgctatgtatagaatactatgtgacaattaaaaagaatgacatagacctataagaaattatctttaaggcacagtgttgagttgggggaaagccattttttggactgtaggtacggtctggttggttccatttatctgaagtacatgtatatctcatataattcacagaaccaaacctggaagaatatacaacaaactgataatagggactacctctttggaagagactaagattagggtaggtgataagtttgccagatttagcaaataaaaatagtgcttagttaaattttcattcttttgctgtatattcagtgtttattggatggctggattgataaatatagtatgaagcagatttggggcccaaagtgaaaaagcagcagacttatcagcaacacaggttcctggaaatagcggctacatttaaaattttttcatggaaagttattttcaaactcaaatactctaccctcaaccttatctaatttaatctttatcatatcctgtgaagataaatattattttattaaagaggttcaaagagcgaagtaccacatttgatcagttctaagatgcccattttttcacaaatgggcctttgaaaacagaacacattttgaagtcactgttcgcaggcatcagtcctgatccagtggtgattgcctgcccacgtgcctgaaacttgcagagttactcaatggcaggcatgaaaatcctcgaggtcatagtagagttctactgctctgtcatcagtgcccttcatgggacagaagacaaaattgtgtggaaaacacagacatctaacaactctgagtagaaaaggatgtgaaagagcaggactctgaatgtgaagaaattcttggaataccttcatcaaattatttcatttcaaatttaatttttaatgtatgttcaagaatgatagataaaatccaaatgtgaagaagtctgcaagagcccttttaatgggcataattaaaacttctgaatgataagaaattgtgtcatgtcagtttgacagtcatttgtcttttttagtagtacattaagatttagattcgataaaatggacatgttaattagcttgatttaatcattccacaatttatacatttatcaaaacatcacattgcacctcatgaatatatatatagttattatttgtcaattaaaaataaaatacacaaaattacccaaggtcgcccagcgagaaaggtaagagttaggaccataaagcctataccttgagtctcttgcagtgtactatagagtgaaaggaagatgactatacactttttgtcttacttacaaactttccactcttcgtgtttcaagaaattgagaactgtccagggagttggcagtgataaaaatgttacatatttaacattacttggagaaatttggattcttccaaatgctgtaaaataataatgtgtacattcatataatagttttacttttcaaagcagttacacacatgcatattacctgattaatagtgtatgagacaaacatagtatcctcccatttaccaatgagtaaactgatgtaaatggaaattaggtaaagtactactaagaagcagcaacagatcccaaaggaaaactgaggtctctgttatggtttggctgtgtccccacccaaatctcaccttgaattgtagctcctataattcccatgtgttgtgagaaagacccgttgggagttaagtgaatcatgggggcagtttccctcatactgttctagtggtaatgagtaagtctcacgagatctgatgattttataaggggaagcccattttgcttggctttcattatctcttccctgctgccatgtaacatgtgacttttctcctcctttgccttccgccatgattgtgaggcctccccagccatgtggagctgtgagtccattaaacctcttactctttgtaagttacccagtctctgatacgtctttattagcagtgtgagaacagactaatacagtctctgtgccagtccatgaaacatctaatgattagcctgccagggaggtcctgaatagcatacctgtactgaataacttcccagatttggacaaatattggaaagacaataaattttttttttagttgcagaataagagatgtagaataaagtgggtgcactaatctcaagcatacagtttgatgatgttttactagtgtaaccatccagatcaagatacagaacattccagtcttccttatgccttccccagtctataactccctcccccagatgtaatcactacactgacttatttcatataaaaagtatgtgctttttgtgtatagcttcttttactgagcatcttgtctgtgagatgaatttttgttcctctctctgccaaaatgtttcccaagtggatagaccatttgtgtttcaccatcagtgtatgtgactgctctccatctttgtcaactcttgatatagtcagtttaaaccattgtaatgatatcttattgtgcttttaattttcaattcactgatgattaatgaggttaacctttttacaagctactggactttgggtttccccttttgtgaagtgcctgttcacatctttaacccatttttaaatattggattgtgtgtctttttctaatttagttgatggagttctttcttttttgagacagaatttcgctcttgtgtgtctttttctaattgagttgctggagttctttttttattattatttttatttatttttattttatttatttatttttttctttgagacagaatttcgcttttgtcacccaggctggagtgcaatgccatgatcttggctcatggcaacctctgcctccctggttcaagcgattctcctgcctcagcctcttgagtagctgagattacaggcacctgccaccacgcccagctaatttttgtatttttagtagatatggggtttcaccatgttggccaggctggtctcgaactcaaagtagcaggagttctttatatattgtgagtataagtcctttggcagatacatgcagtgcaaaaatctcccaggatgtagggatttgaatgggatccttcccctctctcttcaccgagaaagggcagcaaactaatggtcttatcacttggacctctcttctatctgagcacttaaaaaaatatagagagacaaaatgtttccctactgccttttagcctattttagcaattcataatatggaacacaaacatcccatacttgtacattttaagtctccagtaaaatatttttaactgcgaactctaaatatgttacagataatgaagcctcatagctaggcttttaaatattaaacactttcaatttccagcatgcattttatcttccaaaaaagtacaaaaggggtgtgtgtgtgtgtgtgtatatatatatgtatacattttatacatataaaattttaactggtaaattcagaaaaaaaagagtttacaaactttaaagaagaaaaacaatttgtttagcctaccattgtactactttgtgaatgaagagtctaaggttgtgtgtgtatgtatattttgggatgagtgtaaaaactgtattcctcttagatatatagttaaagtacaaaataaaaacaaactacattcaaatataagtgttaaagaaacaccagatagcactggtgagcctgatacctcttggcaaaccagcaagtgtcatgtctgacactctgagatgaccccaaaatctgtgctaaaaagttgcctgcttacagccttagcagataaaaaccttcagaaaacatttttgaaaggtgctgtgtgctgattctgacaaacataacagaagaacagaagcagagattggaaatattcaaggaaagaaagtacaatttctatttcaaaagaaacttcttacttagggtatttaccttggttattttgcctttaaacttttgattaagcttttcactctcaacctaagcaaagttcaagttgttctgagaggacattattgatttagttttcattctaaaatattttaaacaaactgagtaaatcttaaaaacaacccagtacttatttgtatcattgtttgtctctaaaatggttcattttattgtctgtcagcaccacttctagcttttacttttccaataattttatgctttaaatattaaaagcataaaacttattgagcacctattcttccctagaatctgtcaggaagtggcagttaagaaaaacaaaacaaaacaaaaaaccctgaataacttgtacttactatcttcgagtagctatagtctgttgaggacataaaacagtgctgtttataatttagaaagttatgtgccattacttagaaaactctgaagtactatgccgtctgtttctgtggaatatttttttaatggtccttagaggatttatttcacaaattttaccagagacttactacatttttttattttctaaagactgctggctactaacttaaaaagtagggttgattaaaagaaacattaatatatatgtataattttaactggtaaattcaggagaatccaaaaagtaaaaatcacccataatcctaccattttcaacacctgacagaggtagcaatctttaactgtagctatatctctttccaaacatttttatatatattcagactaaaattgccagatttagcaaataaaataaggacattcagttaaacttgaatttcgaagaaacaacaaatgattttttatttaaatatgtcccacatattgcatgggacacacttaaactaaaaaagtatttgttgtttatcagaaatgcaaatttaccttagtgtcctacgttttatctggccatcctaatgcaaacatagccacacatacataaacctgtacatatatctcttgttttgtcagaatagaatcaagctgtatatatcactctaagccttactcctttctctgtcgatttatctagtttacatgtcagaattacccatgttctttctaattgctgcttgatattatacagagagacacatcatcgtttatttaactattcctctaattgtggatattttagctgtcttcatttttttactctttcaagcaaaacagcactgaatgtctttgtattgactcattgtaaacttgttggttttgtagcctgaattcctagaagttgaattacaaggttgtagcatatttttaaagcagcattgggtcattcctttcatacttagtgcctgaggctggagacttgaggagttgcagaggggccacgtgtacctgggcacgaggtgaggaggagcttaggtttctgatgatatgggccttgtgtgtgttaggcacctttctggcttctcaaattcggtttcccgccttcactgttcgctccatgagacaaggcatccttgttctccagcctgccacacaagttggctcatgatacaaatgtagaatgagtaaatgaatatgaatttattcaaggggttgctgagaaaaataaatgaaataatgtatgcagagtacctgggaaaaaaataatgtatgtaaaatgcctaggatgcttctttatttttctcatcccacccccatttccagttactttcttagcatcaggaggctgtaatctagggagggtgacattacagttagagtaaagtggaataagttctgtgccagaactatgctcagagcattgtgagattatacgaggcgggcacataacctgtgcctgtaaggagaattgcccaggatgtggccaaaagttacttaaagtaagccttgaaagacaagttgaaaggagccagacagacaagatgtgtatgttggaagatgtgtgtatatcgggggataggacaatggagcaagcattccaggaaaagcaaatagcattgcaacagaacagagatataatagagcatgttaccctcagagcatagtaacagggatgtaggaacagctggaaattaatccagagatagttaggaagcagacgttaaagtgctttaggtaacaatctaagttttacctttgtcttatagtgaacagtgggggacttctgcatgactcagatttaccttttaggaatatcacttagggctaggcatggtggctcacacctgtaatcccagtgctgtgggaggccaagacagaagagttacttgagcccaggtgtttagaccagcctgggcaacatagcaagactctgtctctacaaaaataaaaataaaacattagctgagcatagtggcatgtgcctatagtcccagctactcaggaggctgaggaaggagcattgcttgtgcccaggagtttgaagctgcagtgagcttcaccactgcactccatccagcctgggcaacagagtgagatcctgtctcaaaaaaataaataaataaataccacttagtgcagtggagaaaagattaaagatgcaaaaatctaaagacaggagttctttgtgtcggaacaccattgtagtaatccaggcaagagatactgactacttggcaagggccatggagatgggagagaagggcttatttgaaaggtaatgtaggaactataattaccatgatttcgtgacttgttagatatgtgtttgggaggagagaaagaatctaaaatgtctgtcagatttctgaattgatcatttgggtggatggtggtaccattataccagataagaaatacagatggaaggacaggttttggtgggagtaaagaaactgtattattattttggaacagatggagattacagttaccagggactattctaaaaaacatagcaggaagcatgtgtacatttgcacatgcagaagtttgcacatctggagcttgggagagcagccccagctgccttatgactggggatgcctcagaatgtgactaaatgttgaagccacaaatgaatgggagatgaggggtggaggcagaatttaaaatttaagacagtcttgagaagtataattgcaaaggtaattatggaaacacaaacaaatggtgaatgtttttggtagccattatagacaatagcaaagggagcttactagagacccagagaaggcagtaccgaaagcccagatgaagttagagaccatgatgtgcaaccacttcagacttgttatgaacattttctctcagcagtcctaattgtagagatgtgcaaattgttctgagattaggccttagaggaccagtataagaaaaagtggaagccaatttttggtgcctggaaaaagaataataccaaaagctgactgggggttttaggtgggccaggaaaagtttgaaggcaagaggcgcacgtttaagaaaacaactagttcaagacattttagacaggggtatccctaaatcagagtagcactgaatacataaattgtatttgcaatgcaaaaacttggatacctgtactctattatgctgaacactaagagtttcccatctatagggatgcccatgtttccctgggcaattcctattgtaataccaattttttttttttttttcggagatggagttttgcccttgttgcccaggctggagtgcagtggccggtcttggctcactgcaacctccacctccagggttcaagcgagtctcctgcctcagcctccctagtagctgggattacaggcatgcaccaccatgcccagctaattttgtgtttttagtagagacaggattttaccatgttggtcaggctagtctcaaactcctgatctcagatgatctgcctgccatggcctcccaaagtgctgggattacagacgtgagccactgtgctggcctgtgataccaattttaacattagctggataaattcttctttgtaagagtcattagatcgttaacccagttctcagttttgccttggtgggtagctcttcagttccatttggcctgaagatcccccttcctctgcacctccatgcttttcctgactagttgtgaccacccagatcctcttcctccagcagattgaagaagttgttagtgaggagtacatggtcctccttccactggagatacattggctacctctatcataactgacttcagtttaaaaagtcagtccttgcaacaacacaaaataaaaaatgttgaagtcccacctctatggagtccccataagcagctgtgcgtgcaactctacccaaaacagataatatgcacagatgtgtttatgggaaggaggcacaaggactttcagtgtgttgttttcagtttctcaccactacaagggtttcttttctttttcaaggaggtacattgtggtaagcatgttttatgacccataataaaaacccttgtaaagaccattttttgaccaaatgaagctaagtgttcttttcagagtccttgtttgctcctctccccctctctgtattggaatgcacacagttcagcattaatggataacataaggaaataatgtcacaaattctagttcttatttgttaagttgagaaagcaaccagagttaactatgtaagaaagttcatttgtaatgtttttcccgttttggtagtagcttcagaatatatatgttgattaagtaaaatggtatatttcatgcttatagtatccggttattatcctataaaaagcacctaaggacagtttcgggaaatctcaatagtcagagaggcctacagaaaaatctgtccaggtatagggaaaaagcaacttaaaaccattttagcaagttgggtcatttacaaaatgaaacatgtaatacattcaatgaataataacagataatttctaaggacctagactttcaaaattaagaacagaccacataacatttgatttaattaaaacaacagatattttaaggattatattataagttgtgtttgttgatcttaatagagtgttagggaagatagaaggctatccacatactaactggggaaaattcagtggatctgaacttatagtattatcacagcctcatcttcatttagtggcaccagtgctgaacccattacccaaactgggaggtttacacattgtttacccaaactgggaggtttacacattatttttagttcttgtagccaccctacaagaaagtgttgtccccattttacagatgaagaaacgaaggttagatgctagcggagggaagattaaataacaggcccaagatcacacagtgtgcaacctggaaatgtagcggagctctccaaagatgggccattaaaattgaactgtgagaacaaatattaatatatcacatttgtctcttgaattgcttttccccttgctttttgtttcaatattctaatttagaccttctctatcatatgttcagaatagtatcatagcctccttacaccacctcccatccattatgtatgctaaaatgtcaataataacatgccatggttttacacatttttactacttacccactgaatataagataaaacactatagactccctgtgtccaccagcaataaatccctttgcagtgtggtcccatttagcagtgtgccctctttaggaccctgcctgctggagctatagctggtgtacaaacacgtaagcacttcctcctcctctattagtgtcctccatgacagatgcttccccacaccaaaactaataccagccttcctcccagattggcttagatgctgctccctccttggtgcttactcagtgcctagcgctcttgtgccatttgtggtccttggcacatactgacatgaagtatgtaggtacatattcttttctccctgctagagtaagagctccttgggacactctattcaggtgcttccgtgtagcatcacctgacacaatgccttacacatagtagggacttcatagttcttttgaataagtggtagcaatttattatgtgtatgaactttacaataaataaagtgcttaagcataatatcctatgtcatatatataaccataatacacataatcatatataaatatatattacataatctataatatatcttgtttaaatctttttgtggggtcattttctcaaaaatagatgtgaaaagcaaggcccacgaaagttgcaagtgacttgtcttagattatctaacttgcaagtacaaatttggatccaaagcttttagctcaaaacccagtgctctttcttttaaatcatactgccttcaaaaatggaaatttacatctcatgtctaagtgactcacttaggtttatacgtacccaaaagaaacttttttaatacttttatgcctccacttggcaagcagtcagtaaattcttagtgaataaccaataagccacaatgcaggattatggcttttttgctaaagaaagactcaggaatcagtttaatcggtgagaatgttctataactcctgtacacaaaaccaagagcaaaggtcactataattcatcttaatgcatatctatagactattgggtgattcatccaatcaagtaaaaccaaaagatttctatgtataacgtgccttgttcgattcttggagaatataaagatgcattgcattcctgttcctcaaggaatttgcaatctagctggatagcgcttggcagtttaaaaaacaaatcaaatctataatataaaataatcaaatgtctaggttctctccacagttctatgacagaggcagggcaggatttattctggtttttataagtgaaaacctgaggctccaaaaaattgggacttcatagacactggggactactagaggagcggggaagagctgaaaaactacctattggatactgtgctcactacctgggtgatggaatcatttacacccttagacatacaaaggtatgaaatatacctttataacaaacctgcacatatacccccgattctaaaataaaagttgacaaaagtaaaaaatgaaataaaaaatctgtactattacaaaaatgataagaaggaaggtggaacttgcttaatcaactgactagtggctgagttgaacggaacttagtaacactggagtaagagactgtactttgagaaactctgatatgatcatatgaaattaaagtagtattaggggatttggccaatagtccaattctgcatccaagtgaagactcaggcaaagtgatttgatctgtggaatacttctcttagagatgggagaggataaggtacttaagctagtcctaccccaagctgtggaacaatgtgctgaaatccatgtctcttgacccctgggcaagttgcttctgaaagagatggtaagataggaagcatccttcattgtttttgttcagtgtgtcagtgttcattatagtcatgggagttttatatttctaaaataatgagcccaaagtctcaacacatatgaacatgttttaatggctaaaaggtacgaatactgatttatatgccatgcctcttttgtccctatcccgtaatccaaacctgctctttctgattcccctggagttttatcgcattcctcctaaaaggagtcagtgagttctttttaagctaatggccttcatagatttcatggtcatttttagttttgtttgggccctcacttctttatgaaaactcattgagcatttattgacacccattagtacaatgtggtgggaggccaataaatctagaggaagagcaatttaagcaggaccctgccaggagttggggccatggggcagtaaatgagtaaagatggcagaaatccacagagtaccaggaggcagggccagagagctaggtgggctttggctgagggggctgaagcaggagaattatctgataggatcaggtttacacttttaagggttcagtctagacagagagtacaagatggatttgaggactgagatcagtggggaaaggctaggtaatggtatatgtgaggaaggagaaggcggaccagacccgctatagtgggagcctcagaggtgtaggaattgtatttaaaaagacacgactttactgaggagcccagaacaagacttgagtaaatgaagaaaaggaaagactcaatattgtaaaggtatctgttatccccaaatcaatttatcaatttttaaaaatcattgaaaatactaaaaggatttttggaaggtgtgggcactcaataaaatgattctgaagtcagttcataatcataacatataagaatatccaagaatgccagacacgatggtgcacacctgtagtcccagctacttggcaggctgaggtgggaaaataacttgaggccaggaatttgaggccaacctgggtaacatagaccagcctctaaaaataaataaatacatatttttattttcaaaaaatattcaggaatgttttataaagagtggaaagagaaaactttccctgcagatgttaaaatttactctaaatatttaataattaaaggagagaggtactctaaacagagccagaaacaaagagcaaaagtccagaaaataacttcaagtaatttagaacatgagaaatagtggcatttaaaattggtgggtaatttaatgactgcttaaacccttttgctaatcatagaatataaataaaaatagaaaaatatagaaccattaaaaattaagctgtagatctacattgccaatagatctacatgcaaatgagttcagtatacagcatgatgtgaaaaagacagttacaaaattgtatgcattcgcattccatttagaaaacagagactaaccatctgcatgagtattatgtagatggcaaaaatgggatgaggttaaagaagtcaaagttctgaagctaatattagctgggcatcctagtgatgttggagtcctgcaggaagacgttgagtgtggggtaaacaggatgagccatggttcctggggaatatagagagttgacagtaaatgatagtgatggcaaaggcgatattataaacattaatggaaggaggtacacacctcaaagagaaaaggataaccacctgaaagggatgattgccaacaggaaaagaatgttggtacaggccccattgggtctgtacctcaccctggggtgaatcatggtggctataaatgaaagataatgttcataacatatttaagttaatataattttaattaagttagatttgttagaataattttcagctgcaaattacagaacactcaatgaaaagtggatccagataagggcattattatatacataactacaaggctggaggcagacagccctaaagttgatgcagctattcattgatgtcatcaaagacccagactctttccctgtttacactctggccttttatgtgtacagatgatgtttcaagatggttgctacagctcggtagcattcagtataagacgtgggtgaggaatgggagatgaggaagtacagcagagagcattctactgtgcacctcttatcaaggaggaaaatgcttcctgaaactctctagccaatttgcccatacaggactgggtgtcatgttcatccctggatcaattcctagcaaaaggaaatgtgattgccttcattggcctggaccaggtcttcatggctgacaaccagcagtatcttctatatcacacaaataattatctgttctactcttgtggaaaaccagctcctctaagcattacctcatttgaagaggaaggaagtacagagtgaggggaaaattctcaaaagagggaattgagaggaagaatgtggaaagataagaaagtattttgtccaattgcagccattagaaagcttattaaaatttcttcttctgtttttgagagctgtcgcccaggctggggtgcagtggtgcaatcacggctcactgcagcctcaacctcccaggctcaagtgatcttcccacctaggcctcccgagtagctgggtccacaggcatgagccaccatgcccaactaattttttgttttttgtagagacagggtctccctgtgttgtccaggctggtctcaaactcctggtctcaagtgatcctcccacctcagccacccaaagtgctaggattacaggtgtgggccaccacacctggcctaaaatttcattatagaaaagtgtgtgttgaaatggggaaatattcacagcacattgtaaaatgtttttaaaagcctcacaaaacaatgtgtatagaatgatagccacttgggtcattacccaacaacctaggaacttgggcttcatgttttcttacttctttacccagtgctgatttttatctcctgctctgaagaaattatgtttagcattgcatatttgcagtttcagttcctgatgattttccacagtgggttaaaaatagccattatgatgaggtaatgatttattctttcatgttgttcatttaagtcattacattgttcctcaaacaccaacattttcaggcttggtggaaatgacttattatcttttttttttttatttccagttagttgagactgattctttaccttctcagcattatcatcacttccaggaatgaataaaaagtgggttctgttctcatttcagaatacatatttgattattaaaatttacatgcaatgccactttattacacttttatccagttgcctagaagcagtaaaaattagaagccagtgtttccatttagggcccatgcctttgtttctcctgaggggcctcgaggtgatgtgtgcctgactcatcatgcacagtggcaaagagacgggtactatggcattgctggactatgctttgctgtggaacaaagctcatgtgtgactcttttagcttgccagttaatggcttgctttgaattcacccattacaactttccaggtgatatggaagttttaaggaatcctcttgaaccctcctcttggtttctcagaatttgtttgtcttgttctttgtgattttggatgaagcattctttgggtcctcctgaggaccacagtgagaagtaggggagacctgtttataaacagcctttgaagctcattgttcattgctcattgcaaattgatcaatgaaagcacacgggaaccctgtcaggttttgaaatagagtagaagctgtatacatacagcaagcttgatgtggggacctgcagtgtagattctcccagaatgcagacaaaagtgggtggaatctccaaggagtgaatcaagccacttggctaacgctttaggaccttaacacgatgctgttagtcactatttcattgcttaggtagcaacaatataccacattttatgggagaaccatggttttaaaacattctgggaatagatccagcaattccacttctgagtatatatccaaaaaaattgaaagcagagtcacaaagagatcattctacacctgtgttcatagcagcaatattcacagcagccaaaaagtggaaactactgaggtgcccatctatggatcaccagataaacaaaatgtcatatatacatacaatggaatattatttaaccttaaagaggaaggaaattatgatacacaccacaacatgaatgaaccttaaaggaactatgttaactgaggcgagccactcacaaaaagacaaatccagtgtgattccacatgtatgaggtatgtagagttgtcagattcatagaaacagaaaatagaatggtggctgtcaaggactgaggggaggggtacatggggagacatgcgagagaagttatatgcaggctcaggtgacctttccctctgttgctataatcgtaaccctcaccttaattcaacatgttcttattggtttagtgttaaaaaacctttgttatatgtgatacattttagtctgtggcctcctctaacacacttcataggaaacagacaaaccactatggagagagttctgtgaaaacttgaataacaaatttgaaaagactgaggtttacagagtataaggagaaaaatagattatctttgcctacaagttggatatgtcctgtttttaatttttaaataaactgaggattatacatttttggtgctaaaactttgaggatgtgaatatatcacaagatatatccctatatccagaattgtctatttaaagttgtcattctgtgacttatgatatgacttgggtgtttttagtgtcttttggaaataatcatactttcttgtaatgagaaaataaggcccaggccaggtgcagtggctcacacctgtaattgcagcactttgggaggccaaggcggaaggattcatggctcgaggccaggaattcaagaccagcctgggcaacatagcaagaccctgtctctacaaaaagtttaaaaagtagccaggcatggtaacacacacctgtagtcccagctactcaggagtattgtttgaacctaggaattagaggttgcagtgagctatgatatgatggcaccactgcactccagcctgggtggcagagcaagaccctgcctctaaaaagaaaagaaaaagaaaagaaggccccatgatcaaccttttcccattagaaaagcctgaagtcgttttttagtttgcttgtttgtcttgattttaaataagaggattagagctctggaacacctaagagaaacaattacaagacttcaaggatttcttgtattcagaaaggtccagagtctttttaggggcattgccaagataaagccccacctaagatctctcggagccagacttcattccacaatggtgtcctgttgaaacatgcttgcgagtcgcatgttttaaaaagatagagtgagggtcccaagtgactgtttatcataagtatgactaaatgttcaaactttttataccagactgtgccgtataacataaaaagggaaacttttaaacctgcgtttaactgaaagagccttaattggtggtatctgtagtttcattgcattgcatcactagggttactgtgaaatatttgagtcatatatggtacagaataatttagattaaaatcttgagctaatttaagagtatgcctcacgatactataaactgagatagaacagatcataagcttacgtagagagtcctttgaaatgtctttgatgaaaacacttcttgtgattctgtaggaaaggtgtttttttcttacctcatttaatgttgtaatttatttatttatataatcctctggaattgggactatatcttatgattatttgggaccagagttcctgacgtagctgaatgtacttcacctttgaaattaggtattgcaataaaggttggctaaagactgagaggggttccccagtcatgcttattacaggttcacaatgcccaacaacctaactcgtggttgaattactgaaggtcatgagatgttgggcaagattttgttttttaagtcgttaactcagtgttcattggttcagaattccaattgtgtctagatattggagatttaaaagaaaagccatttgctaaacaaaaaaaaaatttaagtagcctaataaaatctaaagaatggtcattcttatgtagaaccaacttacatctataggcatcatacacatggaatcaacgttagtgcagtcatgtggattcatactgcctaacccatgctttggtatgatattaacaagcccttttaatctactctacctttaaacaaacaagaactagacctgtagtataagtgccaaagtaacacaactaaaactgaataataataattatggcatgtcccagggtgaaaaaccatgcagccattaaaaatctcattgtataaaaaaagtcatattgcagaattttattagtggcaaaatgttgataatgaattgttacatgtttttaaaagagctacaaaataatgtgtacagaataataaccacttttacttaaatatacttatacatccaaatataataaaatacgtaatttttaaaagacagactaaaaagacacaaaaaaagttatattaacagtgaagttttctctgttctccaagtagtggaattttttagtgatttttcttcttctctggattcttaaaacattttattagtttctgcattaagcatgcatctatacatcttagcaattttataattaagaaaaacatagtgtgtgttataacacaaataaaaacgatgtgcatgtttttaaatttgtatactgctaattggctgctaaagttgtttgaacactgcagcatgaaccaaacagatttattctttatactgttttaaatgagtgacacttaactgtatagaggctaaagatgatgagccaacaggacattactttaggttagtcatgctttttaaaattcagtgcttacaagttgtgtgcatgtgtttccaataaagacttatttgccaaaatgttccttgaacattttgtgctacattttcacactcctgtttattcattacaacttattggacctgcagtgcttctcaagtcttgaagggcttttcctccccaatgcagtcttctccagggttttgggaagcttagaaggtcacccctgccagttcagaatattcactcagggggatctcagaaatgattctagatcactgcataccccctctaagtgctttgttcacaccgaccttgtagcagtggtcatgttttcttttagttgtttgtgaatcagtctcccccagaaatcaggacacttatcttggcaataatcatcctaataattactgtttgtcaagtgcttaccatatgccagaaactgtacaagcacttggcatacattacttcatttagcccccttaatagtaggaaaagtaatcgctactttctccactttataaaaggaaaaactaaggctttggttttgaacaagctaaaatataaagacagaactccgaactctaaaggaagaaccaaaaccataaaccagtaaccaaatatactgttctcgatgagaggattcagtggtccggccaatgataagtgtatcctcacagccccttccagctctgaaatccatggtggtacccagtcatttttctaacccttgtattaacaaaacagctccatcctcccttgtatacaccattcttataatatttgggtcaggggagtaggtcactcttaatttccacacatttcagaggattatgacatcatggccaatgtcttagttcctaccttcagacactgtccctgagtattaaatcttgtgtatatttgtattggtcctaaaattagaaaaagatctgatattggtttatatcctgaatgatccgctcctccatactggttaataataacagtaataagcgctgccatttactgaatattaactatggtgctaagtgctttacaatgatcctatgataaagtgggctttgttactgtcccattttacagacagggaaactaagccttagagaggttaaatggcttgccttattttacgtattcatttgttcattgatttgataaaggaatacattggagatttgaatcgaggttttccagaccctagtttaaatcaagactctgttaatattctaaaacagttgattaagactgggcatggtggctcacacctgtaatcccagcactttgggaggctgaggcaggagaatagcttgagcccaagagtttgagaccagcctgggcaacatagtgagatcgcatctctgcaaaaactaaaaacattagcctagcatggtggcatgcacctgtggtcccagctacttgggaggctgaggcaggaggatctcttgagccaaggaagtcaagtctgcagggagccgtgatcacagcactgcactccagcctgggcaacagagcaagatcctgtttaaaaaaaaacaaacagttaatcagcactctcttgctagtatgactttgggctaattagtagcctacatctgtgtatcagtttcttgacctgtaaaatggtgtaatgatattatttacctaaatgttgtggtgtggattaaattatttactaagtggacaatgcttagaatagtgcttgatatatagtgagtgtttagtactaggtgctataaaataataatcaccattaataacaatattattattcactggattttaattgttgaaatggcacattaaacaatagagaagcaaaaagtgtcccctcacgacctcctccttcctctccccagcatgagccactgaaaccagtttggcagatatccttccagaatgtttcctattccatcaaaaactattttaaaattgtcctttcattaataaaatacaggttgagagtgaaattttttgcagtgttcttgaaagtgtgggagtggaaaggcaggaagggagacaattcactcattcagccaatacctgtcaaatgcctgccgcatgccaagcagccacaaaatgctaaggattcggcgtccagcatagcaaatgctcaacttccgttttgagtgtttactgattttctttttttaattttattaggatatgatgtttcagcttctccgaggtctggactttcttcattcacaccgagtagtgcatcgcgatctaaaaccacagaacattctggtgaccagcagcggacaaataaaactcgctgacttcggccttgcccgcatctatagtttccagatggctctaacctcagtggtgagtgagagagtgctgtccttttattaaacttatttttcctattttgaatgacagtctgtccctcttccatgtctctaatgttagtactgcccatgactagttggtggatagaatgtctttgcccatttttatatggcagtgggtaggcagaaagcattctgcttacagctacagtcacatccagcctgggcttgttgtggacaggatccattgcagaaatagcctgttgcatcttagccactggacaggaatcagttacaagtttccaaatgctttctgccataaccactgttttcagagctgtatgtacaatgcctagggaacacacagctcaaggtcagggaagaaagagcacgagcaacgttgacctgtctgcagcatcatggttttgagaaacagagtgcctacacaggtttgttaatgcactcatctgaagctatggtgccagctgtaaagaagaaatcaaattcacagtgaacttggatgatgcatgaacgtagagcaccgccatgccaggtgaaggctcatataaccctgaatagaaagagcgaacccaacggccctgttttggcaaaaaataacagttatgataccctgtttctttttgccattcagctgcaaaaccataatagctattgacattggttagcttctatttctccatatagttcattatttctcagatggatttttgtgaaattctgcaccccaaatacaaaaagagcagcctggaaataggtattaatacccttctctttgaaagacctgttttgcatacagtaaattcatgccttacgtacagtaaattaaataaataatatatagcaaattaagtcttaagaaaaagaattttaaaaaagaaaatatctttgtatattcaaagaaataaaaaaaaataatccgtattgtccatctttagcctcaaagtggttctcacatcagggacagcatggccctgttgttaagtaatgattggcaacatctttggtcattctgcacagcaaaaaattgtttccctaaatttcagtaatactacagctgataagtagaaattcaagagaggagttagaaattctctgagacagataacttgccttaggaaaaaatccaatttataaaagtgttccccaccccctgcccccagtcaaaataggggtgctaccacctagacacgtaagaccagttactttccaaacattatagacttttcctagggcatcagaacttttgatgcagaggattccttggaaaatgttgccattgttagaagataaatcctactcatttcctctttgcccagcatacaccattgctttagaggagaaatggcacgagttgatgtttaaaagataggcctcagctttgagcacggtcaagcaagcccttgtattcttatgtaatcacaccagaaagggctgagtctgtgtatttccccagtgggaagggtgaggtaggctttgagtttccctaggaagttgttgcgcatgttgttttggggccctggggagaagcttgaataggctttgtgatccagagagtcatcaggggagtagatggaaggaacttgtctccttgggtacgttaattgaaggaaggataagctgtaactgagatggacgcttttattttaatccccccaaatgggcactaataaccataaataaaaacaggaaacccagttggtttgtgtttgattttttttttttttttttgcttattaaatttgagcttgtgcgtaacatcaattaacattccattcttgctgaaagttgatatgttcaaacaggaaaatgtagacaaattatttcatagaggaaaaggagaaaggcagtcataaatacacaatttttcagtatctagtttatactgcatgctttatatttcctatagtgacataagtaaaacatgttagcagctgagaaggattctaaaacaaaaatcagactttattggaaagagtgacggttggaatttaatggtaataataaagggtatgttcctacagggtactgcattttaaaatttccccactcttttgtatttttctatttaaaggaaatacccatttaatatagtaatgcgtcgatttatatacacatggtgacataaaaacttggaatcatagttttttagactgaactggtatgtatttttagtgtctcttgaagagaaaaagactacactcctcttcctggaaatacacattttttagtgggttatgtcatacaggaactgagaatcaacttaatttgtggaatgttaaaggaattacaagttaactgattcaaaactgacatcttaaaactatgagaaatgctagtattttacttaccttgcaaagcctgactccagaggtaccctttctagtatccccttcagaaattaatttctttttcctctctgtttccagagtaatattttgggtttttttgtttgtttttgtttttgagacagagtttcactctgttgcccaggctggagggcagtggccctatctcagctcactgcaacctctgccctccgagttcaagcgattctcgtgtctcagcctcccaagtagctgggattacaggccaccccaggctaatttttgtatttttagtagaggcagggttttgccatgttggccaggctggttttgaactcctgacctcaagtaatccgtcctcctcagcctcccaaagtgctgggattacaggcataagccactgtgcccagcctataatactgttttctgtcttgtttttagttatttgggaattttatttatcaggccataagttcctcgaaggcagatgctcatcttattcagccctaacacacagtgccttgtttattttgataggcactcaggaaatatttttcagtgaataaattgacaaatgctgacttgcagatataagcagttgagtcataacaggaatagagaaggagctatgttatacatttaatggtctcatttgatgtgtgtcaatattcctcatagctacctggtaatattaagctgaaggacttactccatataccttaaaatggctgagtccattttgcaccctagtcctgattgatttattggcagcacatatctgtgttcaaaatcatgaaagctattaatacatgctgtagctcaatctcaagttaggagtgaaaagttgacgcaaacccaagttcacagtctgtgtattgtttttatcataatcctttctactgcctcaggaacaaattacatatatgaattgaacttcctgtcctgaacagaaagctgtagagatagaggaatgtagcattattgtaattttacttatttgaagactttctttagccccttgtgttttgttattaaagcaagttttagaagaggagtcatattcttctaagataattaacatcctctaaatgaaagaatgggtgaattactagacaacttttactatctatgttaatatatatatatttacataataaatgatatttctatttgaacaattataaaagcttgtattattagcttctttctgaaaacttcaaaatgttcttacatatagaactttgagggagcagttaacagtatttattttcattttaagttcatgatcacctgacagatcctgaagtactacttctccttaatttctgagccagtatgctctatgccagtattcaagacaaggcatcttttggattaattgagaaattagttgttctagacaggtaagctttccaggcatcttaaggtataaccctttatattatgatctttattattttatttttctagtgaaaacaagtttcttgttaagaaacacgagtttcataagtagaatatacttcatatgttggcctttggtagaaattaatttaggacagtagcctggaccatagttgtagctgtaggtggtatgcaacatcgggctgaatgacttatcttgtcctcatctgataaattgaggactaatcaaagagttaaatgtcttttgcctaactttgccaggctgcctccaacatgacattctggtgtctttatggggtattgggttcttgctgctcaatatagtgtcttgtatgcacatgtacccatacagagtattatacctttttctttaaaggttgtagaattaagatgtggatggtaacagtgtttgccttggtcctaggcaagaggggcccctgacctggatctcatgctttagagaagcctacactggccctactccagccttgtctcccttcatggagcacacaacccagggtgccaaggaagcatgtctcttgagacctccacccctgccccataccgcacacaggacattgcaattccctgactaaatgggaagggcatgggctcatccttcctcctaatagggattttgccacttgtgtgttcactcctaagcctaggggcagctgtttgcagcatatgggcagagcttggacttgcagactggagtgtccgtaagcatgtgtatgaggccccttgtggttcaaagaaggagttggaaatgtgaagagaagtggggcctgttatatttaacacctggcatgggttatttttatcagaaaagtttctctgaaaccatgaaaaattaacttctctgacctctattgaactattacatttgttctcattggaaaaccaatgagaacaggttacagggaagttctttccattgtacatagctgataggtaaaaatcatgacatgtgaagttatataatgtctctggcaaaagtgtttcaagaatatacacctgttcggtacaatgactgttgtgactagctgaaactatatttagagtcactctgaagtcaacatttctaagtccttctcatgtgaaatgtagtgcatggtgcaacttatttttgtgaagataagggaaaaagagaccagccactcagccagcaatttcagtcctacctcactgtgcacccgggtctgacatgtcttagagcagagccaggaacatcatcagcagccctggtgagggctctgacagtcatgaagcactgtgaccagcaagctcaggaagggagcagtcttgtcttcccatttatgatgcaaaatctttaattttttttctaaacctaatcatacagcttggagggtgatattgttgccattggatttggtgctcttggaactctttatcaaccatttcattttgaaaagtggggaaactgccattcaaacaggcagtgtgaccagcttaagtctgaatttaccaaatagattgtaaatggcttggagaattctaatgtttatattctggctctggcccactatccccactcctcttttctccataccaaaaattcagtacccaagagggtatcaaactgtgttctgtggaactctcagattctacaaagggtatttagaggttccacaaatgtttaggagtccatttttaaagaatattttttaagtcttgttaaaataataaaaccaaaaacagacaactagctcatgccacattttgacacagtgaggaacactgggtcatgaactggtgcctcctggttttctttttttatgtagacctcaataaaacttttgccacattgtgcacctgaatgtcttataaaagtatcattgcttaggaaaaatgaagcattctcttgattcagtcctatctgtgtcctctcccttaaaatcacccaagtccataattgcaacagcacattcattgtgctgctctcagtgtacatgggaatactgtaaggaccacccaaggcaatgccagtattgatgtttttataccacaggtgattgccaacacccaggcagttagagccagccactccccaggacagccatcataaagccatccgtgggtagagagaagtgtaccctaaaatgaggtcattctttttggtacctcagtatctttgtatttttggggcctttatacaatcatttaatgctattcatgaagttagcatttttccttcaaatgcctgtgccaaacacacctgtatagtttagagaaacattcctctttgtaccataatggaagagtgggagtatgttcccatctttttagtgacttaataaaattctcactaagtgaattatattctctttctccaagaatctttttttccatattaccttcactaataaaagatatacatgttctgaaaacaccctttattccatagaaattacaaaaagacaacaagtaaatgttaaacatgagaagacttttattcgacagctgtacaaagtacaaaacttaattttggaaatttttttttaaatctgtaactgataagattcccaatattgctttatttgagatcattaacttatttaataccagaagtattacaaaaattgccagggaaagcatcaggaagaatagctaatgaatactggacttgatacccaggtgatgggatggtctgtgtagctgaccaccatggcacacgtttacctatgtaacaaacctgtacatcctgcacatgtaccctggaacttaaagttgaagaaaaaaaaattacttacatccccttcctgtgcctctgatgatattccttccttactctgacctcagtgttgatagcatttagtaacactaacggaacctcgtggattcagaaactttgataagcctaggggagaaaatcaatgaaatggagttgtggctttcagtcaacaaataattactgatcactttctatgtgcagacgctgtcagtgaagctgagggatgatggtgaatggaaatggacaaggtcagagagcttacaagcgagatggagagatagatctgaatcagatagtcacacaaagaaatgtctagttagaaacagagataaatgcaataaaggaaagggatatggttttatgaggccatatgataaggctcaagaacctgcctaggctaagggccagggaagccctccctccttacccaggtcaaaatgtgggatgcttaaagaggtcaccagcatcctcctgttgaacgcgcctggatgtgggccctgtgaatgtgcgcgtcatgcaattcgtgcttggggtgtgtgtgtgtgtttggaataactcattccacggcacccagttggcaccaccaagtgacaaagtgaagcaggaccagagatcggagaacaatgtcatcttttacaggagaaaataaattgtttatgcttgtttcctcttcgtgcgtgttgtatttactatggagacctggcagggtttgtgcctcggcttgggcagccgagtagctcccacagaagcctccaaaagctgccagtgcatactgaataaatcaaaccaagaacattacatgagtataatggaaaaaacccaaagccccgtcgcctcggcacctcagcgaaagtgcaggacacacctctgaagcaggaagggctcctgtgactccttcccctctcaacatcttgccatgacacaaccaggtctgttttgttaaaacatccagttgccagtacatatttcatagttaacaatggagggtttgtgccggtttcgttttcactttcaccagtgagggaagtggaacacaatgggggcagtgcacagagctgggaacaggacacgttttctttaggattcccagggctgggtacatggaaaatgccagagccaaaacaaacatgaaaacccatccagattctccactgcgcgttctcagtggtaataaaacacatttgagttaccatctgataggttagctctgcctccacggtgaaggcaaatatcgatgaccactgtgagaatttctgccatgtagaaagagaatgtattccatactgcacagaaagctgctgttggtgcatgtgcatgcatgtggctatctaattgcaccaagtggatttgcgaagtgaatcaaatgactgattcccttgtttataaaagatagtcattcatttgactcacctaattctagctccttcataagtggtcactgttgcgaattagttctggacaaaaacagttcaactgtaatgctactgcctggaggatgttttactcggagaaagagccagaagttccttgcttttttcctacatttgttcagccagcatctatcagggtatgatacagagaatctggttgtctgtctttctttctttctttttcttttctttctttctttttcttttcttttctttcttttctttctttctttctttttctttctttcttctttcctttcccttcctttcttccttccctccctccctcccttccttccttccttcctttttcctttcctttccccttctccttcccctttccctttcctttcccctttcctttccttgaccaggtcttgctgtgtcgtccaggctagagtgcaatggcacagtcatagcttagtgcaggctccaactcctgggctcaagccatcctcctgcctcagcctcccaagtagtaggactacaggttcacaccaccacgcccagctacgttctttttttttttaagagatgggggtctcattatgttgcccaggctgatctcaaattcctcaagcaatcctcttgtctcagcctcccaaagtgctgagattacagacatgagctaccatgcctgggcctgtttttcatacggacaccctatatgatgccattcaaaatctcaaaagcctgaggccaaactggatataaagactaagcattgtcttaagattaatgagaccatatgcttcagaaagtttttcaagtaaagggcttctcagggatccagaagatgaaaaaacattttgcctcctacatttaacatttttgggaatatgcctctgtgctagtttaggggcttctctgaagagttctatttaatgagataattccatctcccctaaatttgcttaactcaacgcaagtgttatattcatactcataggagtatgagacatggtccttggaattgaatataaagcaacatttcaataatttggatttttgtgtcctctttaattctttggacacgtgagctgcttgtattttagagctgtcactgcttccttttaaggaaaggagaggtggcaatattttgcttaggctttgataatatcatagtgtaagtttctgagtcaagataatgtttctcaaattctgtaacattggccatatccatttttattcactcagtccaaataatgtattttagcatttcctacagtgccttccttgcacgaggtgggcacttgagtacatggtgaatgaatgaatgaatccttacgattctccagtgcctagagaatgaactgtaactctacagcatggcatacaaagttttttgaagctcagctccaacctacctttctgtctttccatcgcttctacccaaagtggtaagcacataacataagcacatattctttatcagtttttcactattctttgaacttaattgctttcacaactccctgcttttacaaatgaatcaatgaatggatttcctactctgcattctccatgttgctgcttgtgtcattgcatcatcaattataagcatccaaaaaaatttttttaatttgttttagacacaactttcaactaatcttcccaattgcctgcgtcactccttgataataacttgagctctgagggagtaacatttacactttgaatgtgtgtctgggcagccattcataaccttcagataattattgtgcttcatccctctttatttgagatcacaaaccttgccagatctcctgacttgtgcacttagatgttctgtatgttatgcttttattttaaagctaagatcccttgggatctttggagaaaccatagtgtcccaagaaggggttgaaaatctctgcattgcagtttcccttagtcattttatctagtccatttgggtccttgagaagattaaatttatgatcctgttatctgtgtaggtctctccaaaagttgagctcagacttttatacaattactttgtagtgccggattttctgatgcatttattgactttattgctaatcttcccaatgcatttctaaatgatagtctttggctgctgaaccattcctcttattgctcctgctttctgctttccccctctctagggattgaaacccagggtgagtgacattgttgcacccagcatctatctacaaggatactgatgatttttaaatccttcataaatttgaatgttgaactttactgttggctgtggaggaataatctaccttcaaatctcagggaaacatccaaaagagaaaaggggaaagcgtaggagaatttactttagcgctgctcatatatttattttgaaggctggcagaatctaaaaatggggctgtaaatttaacagctcaaccataaaaaccccaaaataagggagaaaaagctctactacttcaggtttggatactgatataaagttacaagattcattttcctcttctgtcttaaattctttttaaaaaatttctagcactgtccttccctttcttttttcccatttcgatttttaataattacttttttaaatgttaccaatgctttgaaatgtacggaagtgttttataaatacatggctggcatatttcagttgatagatttcatggtgacgttaaatactatctgcaccttatgtaacgctggatgatttcagtgaggtagggactgcacatggtatcagttcttgtgggaaaatatgcttcagtggcttactggcactggttttggaatgtggcatttaaaagtacctttttacagtgggaaagaattctgtcaagaataaacagtctgaccttgttaaatgggccaaagtctgtctgtaacctagttccagaaaactagcttttactagtttagaaaaagcagattagaaaaagaaaaaaaaaaactgtaaaacttttataaagtaaagcatttaaaagctactatcaagaatgtgaaataaattcctaaaatgatggtcttcacatatattcatgagaatgtccttacctgtctataaaatcccatttttgcagaatggatgaaagatcaagactacagttagtcagaaaaggagattttctttttcctggaaagacaagactggcatgtagaagggagctgtgggaacagccatacaacatggaccactgtgggaaacaagcccgtttggggaggtgaaggagtaaaaattcccagtgactccccattgcccacacactcaagtctgtatactctgagctccggaatgcagcagtcaactgttcctaacctttctctccattcttgctttcccacccacaccaaacccatctccacacaccctatgatcttgctatccagacctttttgctccttcttgaaaaatcatgccattagattttatgcttccgtgtcactaaacattctctctgcttagattgcctttcccattcccagcctaacaatctcctactcattcttcaagactcagatgccatctctgaagtctgcccaactccccaggataaagttaagtacctaccctcccgtgcacttttgatttgcctgtaatatagtagttctcatatggtagtatccccatttgtttgacttctgtcttctatttttaaaagattaacattgcaaaatagccatttcagcacttcaggtaacaacacacaggcacatggtagctgctcagtgagtgtttatagagtatatgtgggtggtaaaataggaggtttctgagtagaggaggtagaggaggactgaggttgggaagggatgctgttctttaaatattgacttccctgaaaggtgccattgtggtttgtatctgcatccatcttgaaatttaaacaccaagaattaaacttattttgttagtcactttcattgctaaaatcttgtgtttatatttagaagatattctggaaaaccaaagttactgcattttacacaaatgcatgactagtcagctggttggatattgtcaagagtgcacaagatctcagtgatactagttctttttttttttttttttttttactttttttaaattttgaggacttaaaacaaattgacttggtatttaaagttatatttcttcagctttcagtacagagcaacagagtaaatggaagcttaatcagtgatactcattctaatcataaccacttttaatgttaaatgactaatttatcaatattaatttaagtcagggaacatttttaatggagttgtaatagaaaccaaatcttgggttcaaaaaaccaatatagctttaataaaactgcataaatgttttaaaaatcaaatatgtaaaatcaagtaatttgcatatgggctttggcaaagtttttcaaaagctgcctatgcatttaaaatatgatttactagattaagatgcattttaaaagactttacaggtttatgtatattatgtaaaactacttatactgtctggccactgtagtttttacttgatatacattcaaaaatattgtattaggaaaagccacagatagcccattgtgaattgtaaagtgttaatgtcaaccgggcgcagtggctcacacctgtaatcctagcactttgggaggctgaagcaggcagatcatgaggtcaggagttcgagagcagcctggccaatatggtgaaaccccgtctctactgaaaaaatacaaaaattagccaggtgtggtggcgcattcctgtagtcccagctacaggctggggcaggagaatcgcttgaacccaggaggcggaggttgcagtgagccaagatcactccagcctgggcaacagagtgagactccatctcaaataaataaatacatacatacatacatacatacatacatacatacatacatacataggattaatgtctaaagaagagagaaactcacatgttcttatacccaaactgtccactgtcatgccttttattggcaagtagatgttaaaaatgtagcacaatatttaagattttgacaagattgaatagtccatttaaagtaagaaaagctttcaagagtgacctcagcaattttacacaagttgaaataaaatcttgtctttatcttttctttgtatttattgttctatctttatttctataacgacttcttggttttaggatgtggggctgaaaaactgcatttaaaggtcatgttgctgctactatatgcacagtacaatttgtattttccatcagcttatcatttgtaatttttgtactcctgtttttaaaggcatcaaattttttcaatagtcgattgtagttctcaagtattgttagtcccataatattttagaaaaataagatattcatcaattgctttatttttaattcacatgcatttactcagtaattttgtttttagaaatttggtcttagtagacaattttttagagagaaatagccccatttataagatagagttcaccaaatccagtggcattttttgcaggttcttccacattccctttgtagcatttgtatatgcgagtccccgctcccttaaactctcatggttctttttttttttttgggacggagtcttgctctttcacccagaccagactgcagtggcgctctctcggctcactgcaagctctgcctcccgggttcacagcattctcctgcctcagcctcctgagtaggaggctaattttttgtatttttagtagagacaagggttcaccgtgttagccaagatggtctcgatctcctgacctcgtgatctgcccgcctcagcctcccaaagtgtcacggttccttcttcagtttttttgtctgcattctttgttcattgctaaaattattttaaaatttgaacattccaccagtgtggtggttaacgcatgtaattccaccactttgggaggctgaggcgggcagattgcttgcacccaggagtttgagaccaacctgggcaacatgataaaaccttgtctctacaaaaaataaaaaaattagccaggcatggtggtatgtgcctgtagtcccagctacttgggaggctgaggtgggaagatcgcttgagcccaggaggtagaggttgcagtgagctgagagatcatgccactgcactccagcctgggtgacagatagacactctatcttaaaaaaaaaaaaaaaaaaaaaaaaaaaaaaatttgaccattccaggtaggtaaaaaaatgaaaagggaaaatcctcaatgatccttccttccagaaaaaaagccactattaacagtttgttaaatgaacttttatattttttgctacttgtatacaaccctcagtatgggtgtgcatgagggtggatgtggatgtgcctataatagtatacatacaggttttctgtttgtttgggatttcttgtttacttgtttccatttatttatcctaggcattttgtccatatctaacatatattagcctgttattctttttcttactttcactgtgtaaatttacataatatttttacccagtctcccaggatgaacacttgggtggtttctcattttttggctgcagtgaacatctttgggcttatgtttttttcactgaaatactaatttcttttaggataattatttaagaaatggtactaccaggacaaaggacaaagaatgcacattcaaaaatttgataatgccaaattgttctccaaaagggtttcagctcctactcctgcactccttaactgaatgtgagagagctcactgctttgtctctcctgagtgcctctggccattgcctttgctggcgctttctgctcttcctgtcctctaataaagcatccagcatgttctgacttcagccctttctgtgtctgactcaggtccatggctgtaactttcatctccgtgcagaggtgtccaagtcatccgtctgcccgggtctcctctgagtatcagccctcatctctgcttttccccacctctccatctggtgttccatggcagtagaaacagatcataacaaaaagatcactcatcagcttctcctttcctaggcaattctgctttggtctcctttgtttaacttcattactggtaatcaccaaagctagaatcttcagatttttttctggacccatttatagcatcatatatttagttacaagtacaaaatatccaatcaaagtgtcttgaataataataacgtttaaatctgatataagaagtctggagataggtaattctgcaattggtgctgttgcttgatggtatcatcttggttccgataaccgaatattgggaaaataccattccttcttctttggttagttgagagtgtcatccctcagggcctcaagatggctgccacaacttcaaaagcattatatcacatacaacagtattctaagcagtaggtgaggaagcaggggccaaaaagggttttattgtctctttaatcagggaagacaatcttttccaaaagctcttttcaaacttccactttaggtttcatcactcataattgaatcccgtacctacccattgaccaatcagtctgtagataagcatattgctacccaaaagaaaatcaggttatgctagccaggaaagcaggggatggctgttgggtgaacaacgaatgtacaggcccttcattagtctagagatacacccccaccaaggcagcagggccactgtataggtaggaacatctgctgttggtttctttcagaggcgcactgatatattcaccaatctctaataaaatgttttataaagcacagtgcatttttccttacgtgctccacatatgttgaaagcagaaagctttagagtttcatggaaatgttgattagactaagaatgattgcttaccacacccaccaggactatgattccttagattccttaataatagcaatcagcaaacactttttgagtatgagccatctatcagcaatcagcaggtaacattcttctcaggcaaattcaggaagctaaggattgcttttaaaaacagtgaggcaataagaaaaattatgttaaactaagaacttttaaaaagatgtgaatttcattaatattatttacgtaatttatattacataaatagtatgtttgttattaatatattcatatgattaaaagtaatattcagtatttggatgcataaataaaatacatatatgtatatatgtgtatgtttttttagttacatatatgtatatgtaaatctgaagttgcctctacaactcttacctagccagataaaccctggtgaatctaggagacaagcattgttagatctaggagagtcagggaaggcttctcaggggagctaatttttgaggcaggcttacaagtgaggaggagtttgcctggcaaagcacagggaaaggtgtgttctaggtatggggttgagaaacatcagctcatgttcacacacacaacggcaaagcagcaagaagtatgtgggttgttgagcagagtgctttaaaaccttttttaccctaaaaaaaagcagtctactacaatgtgatgagtggattggtagggaggatttggtgtgaattaagaaattgatggcagggaaaccagcgtggaggctgttttaagaaagatgtgtgacgaggggctacgtgagagcaagaatgagatgggacagaaactggaggctgttaaatgtagatccggggaaaacatgttcatgtcaaaatctgatatgaaatttactttatgagataaataagaaataaaaatatatttatttaaatcaaataagtgtctctggtcataattgccttcatactgtactgttgtggatgtgtcctgacacatgctcagaacatagtagccactactgatgtaatcactactatttttactggcagtggtattgaatatgtatagtaatttctcctggtatgattaacattttcattcaaaacggaacaaattgtataatgaagaatctctatatgacatctcactagtagttgtataaatcagaaattttctagtggtttaatgtttatcccaattgtaattcagatgaatctatcatgaaatgacttttttttcttttacaaacagagccttttaaaaaatatatttctttttatcaggacttaaatgatagatgttttactttattgggcctaaagtgccagtgacatggttatgttctaattaattagccacctatctttctgtttctcctttttcctccacataatccagattttgctaaagttggcaaattgtatacctcacttgtggtcgttatatgactaaaccctaatgagggttatgtaatgtaaacagccacaaaataccataatttacttttttccttagacaacaagcaccttgagggaagaaacgggcgtcacatagattatgctcaccaaatagcaattggtaatgatgatgcactttgaagctgtttatgtctattataaaagtaatatatactcattatagtcaaatttgtgtggtcttggtttatctccattctccattcttggttcacctcatccattcatttctctaaaatggtaacacagattagtttctcaatttcaaaagtcagataatcaaactggggtttcaaagaaagttgtaaattagtaaagaaaagcgtcaaattttttttcagccctttttcgatttttctctccttggggctaattaccttcattcacccgtcttccctcactattcctaaagaataacaagtttagaaattagatattggatataatccagtaagagtctgttcagtttgaggattttttaaacaactaaatatgcctaaaaatttcatcatcaccactgtgtgtcttcctccatctgctcatctgctgcccataatatcatacacttgataatggctgtttctcttaagagaataatgtcatgttcttgaggccagagattgttaagttggaagagtctgggaagacagcagaatttaaaacattatatacctagcattctttctaatactacatttatttatcttgtgagagagaaagagactgtgagtgtgtgtgtgcgcatgcacgcacgttttctatatctcatcaggtatttgtgaataaatagttcacacccttccaagagaataagtcctttcttttctttaaacagtgactccattgatgttgttttagaatttcttcccttgtttctcacttccttcttggcaacattgtttctgaagtcttgaattgattcaagtgttcctggaatattactttttctctcctaccattttcaaatataggcaaagagataatttttttgaaaaacattgcttccttcaaaaagcagtataacggctattatacacagtataataccacagtacatggttaaagggacgtattctggaaccagatcttttatacaaagttattttgcaacttaacaagctgtgtgaccttaaataagttctttagcctctctgtatcctgggtttcttctctgctaaaatagagaaaatgacagtacctatcttaataggattgttgtgggaattaaatgagttaatacatgaaaaagtgaagtcctataattaaattatgtaatagtaatactcatctttgaacctgaatatgaagacaggtaaagaaatgaatataaaccaatgaaaccattttattactgttaatcagttacttagaaatcacttttactaaagtttagattactaacatcttagggagaccattctctcttttttcattattatttctcaaaagagagagtgtttctggtattcctgaaatgattatgctgaagaaatctttccattatcagttatttaaacaatgttgaagtctggggaaaaataaaatgtattttttccaaggctacacacgtatctattcttcgaatacaggaaattgaatgcacaaatccagacagttgcagaattttcactgagaatctaagaatgaatcagtgtgttattgtgaatggactgtataggcagtattaattgctttgctttcaggcaccatatctcagtgtgagatctcagagtcccagaaatccagtggtgtttcttcagtctttgttccttgcttactttcaaccactaggcaagtagttgaggatggcacagaaaaattgagttgtggccctggagcacagaccttcatggttgtgcttttcttctttaccacccacaggacaaattctacaaagacaagaaaattgtttttcacgaaggacattttgtgtatttaatctctatagagtggaaggcagatgactggaaagtaacagctcattaattatgaaagtaaatttctttccctactgtagtcaaaattagcttttttaaaaagacagggtctcactgttttgtccaagctggaatgcagtggtacaaacacagctcactgtgcagtctcagcctcctgggctcaaggccatcctcccactttggcctcccaaagttctgggattacaggtgtgagccaccacgctggccaaaatgagcattttaatgttatttctgtactgagccattttgtattccaccgatcacttcctcttgggaataggtggtagttaatattcagaaaggttcatttcccaaataggttagattattctccagtgaataagtgactcattgtactatggattaggaattaatgtcacagataacatacacttctttcacatagtctgcttaagatgtgtcatataagaactctttcagctattaacctttcaagaaagttaaaagaaattcctgaggctttcagcccagcccttgtataacctgcactgtcttgttttgttttacaaagccatgcaggaatgccccccattcagaaaaggagttggtacctagactaataactgagtagcacattcaacctgcaattctggaaaatttgtatttagcatttcatacaattgcttattctctaatttagtctttaagaacatttgtcttaatattgctcttatctatctagtgcccaattcaggattcagttaagccacagtaccatctccaaagaaaacgtaccctggcttttttcagattcaaggtaaaggtgtggtttggccacataagtagtgttgtgtagaaacataattcaggagcttctgcaacatgacctgactgggatccacctttctttggatgcttcctgctctgaatgcccacagcacttcttaagccacccaattcatcctttacatgaaacctttcactctctacttaggtttcatgtgatttccaagtttttttaatgctgctcaaagctctttgagaccaggaacaatgatttgtgtttgctaagcatgccttagcatggacccaaaacgtaggagaaggttggttacttggtgaacaactacttgttatatgcttcctctcttggtgcctgaaggacatcgtagtaaaaatactttggatattctggatattttgttactattttgtgtatatatggaattctaagtacacagtatactaatgaggtaaagaaattttcacagaagcaaaaaccaagagagtttaccactaccaagaattttctaaaggatgtacttcaaaaagaaagaaaataatctcaaaaggaatgcccgagatgcaagaaagaatgtcgagtacatagattggtaaaaatgtccaaacagattcttaatcacagtaaatgtaaatggacaaaactcaccagttcgatggcaaagaatgttagattagatttttaaaatatttctctaaaaccaagtctttgctttttcaagaaacacctaaaactgatcctctgttgaagggaacataaaatgatactctactttagaaaataatttggtattaactatacagtttaacatgcttataccatgaaaccctgcaattccatgccttaagttacataccttagagaaattcctgcacatgtgtaccaagagtcatattcaggaatactctgcagcattgtttgtaataccaacactccaaacaacccaactgttcatatacaaaggaatgattaaattgacactggtatattcccacaatagaattacacagcagtgaaaatttaaaaatgaatgagctatagctacaggcaataacatggatgaatattagcaataatattgaggggaataaaacaaaaatgaagaaagttataaagcatatgaaatatgtataaagcaaatctaaatattatttaggtatatttatagattaacattttttaaggaaggaaatgaaaaacatgagacttaggatagtggttgcctgtgggggtaaagagaagtaaagaagcaagggaatagaattagaaatacagaagaacaaaagagagaggagggctctgagcacccaagtagctatcacatcattaaagccttatgtctacctcttgagttcttatttagatccatactcttatttaaaatttcttcaagttttgctatagtttctgctggccagtcactgagctgagagtgtagaaattaatgatatatataaaatctcccctcattcttgtcaggaaggtgtatgataaacaaattaatatattagataaaatctctggggcccagcagtgcaatagagtgcgatacaccgggaatctattttagagggggagggtggtcaaagaaggtcttttgcgtaggagatagggacagagcatcctaagattcaggagagcattctagtcacagggagcagtgaattcagaggccccaaggtaggagggagtttggtctgtccaaggaaagcaagaaggtcagtgcagctgaggcagagtaagtaggaaggagagaggtcagggctgagatcagggaggtagtctgaggcccctctgtgggggacctgataaatgtgtttgaattcattttgaagtgtaataggtccatattagaagcagaaactagaaaaggagttaggctgataaacatagggatcataacagcaggaaaaaggcaattgataataagacacaagcaagaaaaaattcaagtgattaaaataatacacttgcagagcttacaaagagaaatgtaagtaatccaggaaatctagttacatctaagtcttcattcatcttaccagataaatgaaatgttaaaattttagttgcttgcatacataacacacagatattcttttatataacacattcatgtcataaaacatgtgatgtttatctagagaattgagaatacttgttttgtgctttacttaaccataggtcatattataatgattaatgaggtcatttgaaatgtatttttacctatcttgagatttgcagtatgtgtatgaaacatgtcatatcattagttatgcagtataaaaagagaatttttaaaaatatgtcattgcttatgactaaaattatgatcagaagtggatttatctgtgtctaatgagttttaagcttcagagctcctcactttcagctcccatcgcataccaaggttatgggagaggctctagcaatatggtcatctggtgtttttttttttaattgtggaggtgagctattttaaatgcagctgattaaccttccacctcacccatcacagttctcgtgtcaggtggcaatggagtgaccatgggcatttttgagatctggctaaggggatgttgagttcatttgggttttataagctctatatggggttcactggttacatatatatcagtgggtctcgattagggatgattttatcccccaggggacactcatcgatgcctggagacattttgggttgttacaatatgggggagagggatgttgctactgacatccagtggatggaagcctagggataccattaaacatcctacaatacacaggacagccccctgcagtagagaattgcctggctccaaatgccaaaagtgcccagattgagaaaccccttaacatagttatgcctggctacccccgtgtagaaatggcctccaggaattcacttccaccagcactgtgctgacttacctgggattcagaggtcatttcacaatatgaccatgtcctatggtctctggcaccaaagtctgtgggtagtggaggagaaacaaggtttgaaacatactgagccaaaggctagtctgaggagaattcttcaaggcaacagacatgtaccttgaaagcaaatgtttctattctcatcaatgcctagttaagatggaagttttttcataataagaaaatatatttgaggctgaccatggtagctcatgcctgtaatcccagcacattagggggccgaggcaggtggatcatctgagctcaggagttcaagaccagcctggccaacatggcgaaatcccgtctttaccaaaaatacaaaaattagctgggcatggtggtacacacctgtaatcccagctactcgggaggctaagacaggacaatcacttgaacccaggaggcagaggttgaagtgagccgagatcatgccactgcactccagcctgggcgacagagtaagactctgtctcaaaaaaaaaaaaaaaaaaaaaaaaaaaaaagaatatacttgataatgcaacatatttaatgatagaaataaccatgcaatttttcttctataaggaaagaatcagccttataagaatcagccaaaatagattttatcaatattctatttgattatggctaaaacctgtagcactaccaccaacagtgatcacatgtgaagtgacatgttttctgcatcacagctgttgataaaaataatctttgatcaaccatgttatcttcctgtagaaaatatttcaaaaattgctgtcagatgaaagacagtcaacgagtatgtgctcaaaaataacacagggcaagtgagtttcctagtggaggtgtccgtttattaatcaaaatattgtgattttatttctgcattttgtggtatttgtcagctttttaaaagtgtgtgaggtgctcgcttcggcagcacatgtactaaaattagaacgatacagagaagattagcatggcccctgcgcaaggatgacacgcaaattcgtgaagcattccatattttttttggctgggcgcggtggctcacacctgtaatcccagcactttgggaggcccaggcgggcggatcacaaggttaggagatcgagaccgtcctggctaacacggtgaaatcctgtctctactaaaaatacaaaaaattagccgggtgtggttgcaggcgcctgtagtcccagctactcgggaggctgaggcaggagaatggcctgaacccgggaggcggagcttgcagtgagtggagatcgcaccactacactccagcctgggcgacagagcgagactccgtctcaaaaaaaaaaaaaagtgtgtaagctttagacttcacaaaccagagattgcccctgttaatgataatattgtttgtattttaatcaagtgaataaacctttgaatgtgaattccatcagtgcatctctacaacatatacttgcaaattaatctatatttttctgtgctcatcttcacttctgagtctgtagccttggagtcagtgctcttctaatctcactacctgggcgcttgatcccatccactttgatcctctccggatcctggttccatcatgtctttgctgcccccatgccttcaagcacagtctgtacccactattttccaaagaagccttaaaggggccagaggttctgggcagagttagaggcaagtgggaaaggcatggtaggcagagagagcagcttcagttgtctctgtcgtctgcctcttttcttctgtaactaaggacttcactctggatgtcattaacccttcaattttgtgcaggcagccttctgctgccatcatgttaccgcagtggatattctaaagacctcaccttgtttggcatcttcgggtacatgcatgcttctctattcgttatttcttgtaaatatccaccttgacttctgtgacatcgtggtatcctgcttttccttccacgtctctcactcctctccactgattgcccacctctgccttcctcaaaggtcctgccctatggcacatagcctgtacatgctatctccttcaacagtctcctccgctgtggaggtaatcctggaggcagggaactcatgtatgtccaactcggtccactcccttgagccccagacccaaatatctttctgaatatcatcctaagtagcaagccttccagtcattcccttctgggtccctattcaggctgatggcctcaccatctacctggccacccaggccagaaacctgggacttatcctagattcagttaatctttctttctccttcatttgactcgtttaaagttattcttcctgcctttcctctcctactgctgtggttttatacatcttcctcccagagcatctggatcattgcagccttttcattgagatccctgccttcaggatcatctccaatttcaatcctacacagttaccagaatgcaaatgtagaataatgcatatctgacatacacgccctgcataaaaccctttagtacctccccttctcctcaggataaagtcctagctctgtcaagtaacacttggggtcctgttatctggtccatgcagtttcatactcctcaacttttgctcatgttgctctctctaccagtcatgcccttgcccctcctcgctgaagcctctaacactagatacccctatcctgcaccccgcctcacccctgtggagttgatgtgtatataacatttgctgatagctaaagtttatagagccaggcacctgcagagtactttatgtaccttatccatataattctccagttgccctattaagcaggtactatgattctccatcttgcaggtgaggaaacagaggcatggagaggttaagctatttagccaaggtgatgtagctcataaaagaggagacaggatttgaatccaggcttttaaattatttacgtctacctcgcacagagcttgtgcaattggtaagttacatgtctgcctcctctgctcagctgtgagcttttgagaacagatatgatgacttcatcatctgtgtgtcatctttgcaactgagatccaatgcttgtcacctagtaggcacatttgtatatgtatgaatgaatgaattaattgttgatgtgacattgtaaatgtctcataaatctcatgagaagtgctactaagaatatgtgagagtagtacagatatatctgtatttcacccaccatgtgtattgtccatgaggacatgaaataagtaaaaatgatgttactgcctttgaggagaatttggtttagtagaaaaatgtaaatagttgaaagaacttaaatatggagcttttagaagccattctgattcctgttaccaagaggcattattagtatttatagaaatcaacttatctttttaaaggttcatcatgtgctaatagctaacagcatcagcagtttaattattgacttaatcgaggtctagagtagaggacttcctagtactttgggaactcctggccacttttcatgtcagccttgctttaaaagggatcctaaaatgtgaaagctttctgtctctctgatagtgaactaagttattagttaaaatttatcagcccagttgaagttggcaagatgattcatcttacatacatcaaattcatgcaaaaggaagatatcagttactattttaaatgcaaaaataatatgcttaaaatatagttatgggcatactgtggtttctggaattgtcctcctggagaatcattgagacatggtctctgatgttctttataatagtagcatgcttatttcataagccagagcccatataggaaaaagccttttttccaccatgcaaaggcttataactgaatgagaaaaaaataaattaattacatgaatattaagaggttacttatctattataacattgggccacaagttgactaattaaaaggaatgcaggttggaaagctgccacaaatctgctcctttcatttagagggccacaggctgaagccagtgattgtgcgtgacagactctgggaacaatggtgcagtgcacagaccgtccagatgaagcatgctcgtctgaattacaccgacgacagggtggcctacaggcaaacaaaatggttaaacaatacataatcaagtttttatttggtatttcctgcaaggctgtaccagttgccagggagcgtactgtattttttcttcggctgtattaattgttgaccatagctggcagaaccccaaacagggacagataagggggaaaatggcatctggacattaaagcctcaagtgtactgggggaaaaaaaagcacaaaaaattacagcatatatcaggaattttccagctaacgatgtgcggatgtggtagcgcgagggaaaaagagccaaactgagcttgctttgttcgctaagagaggcccccctgtaacattccttttagctgtgcatattttggcttcatttgtacagttttaactttatactgtgtgtggaggagttcagttgtaactggtggtgcctaataattctattgcaataattaaagttcatggagagctgttaggttattagttcatagaagctgcttcagaaaacggagtctaagctgaaaactttttaagtgacatgtcattactgtaaaagatggcaacaattattttctttgatttcacagcagttttttttttaagacaagattcatttatggagacaaataagaaacaacatcttaaaagctttgggtaggagtgaggggcccagactgggaatgatgagaatatggatcctgtagcctgtgaataaaacattttccaactggcttgtaaaacatgaaaatttgtgatagcataatttcatctgctacttttagattccatttaaaatgtgaaattaatatataaatgttagtaaatctattgcagaaaccaagtattgcagcttcttcacctctgatagaagtcatatgtgacttttaattcagtaatacgatgaaaaatctccaactgaacacagcctccttcttaaaagattgacatgccttggagtccccaataaaatagtaattgcaatgtacaccaattggttagagctgtgaaatatgtttcccgggggcttctctgcagtggtagagggctgtctgcctgcatggttgtcatactcagtggttacttgcagactctggagttagacctgggtttggattgtatctctgacaagtggctagttgtgggactactgtagttattaacatgtttgaatatcagtatcttacctaaaatatgggtaaaaaattatgtgcctatctcacaagtttttatgtttaagtaacataaaatgtgtgaagtccttagtgaagtgccaggcgtacggaagactcttgataaacttcgactgtttttctttggctatgtcttctctgttgtgcagctctggggtttctttgagcttctcaaaacattccttctagtcagtttctgcattagagtaaaatatatttacttaatcaccattgacttccacaatagataacaaggaacaggttgtttggtctgtaatgaaagccaggccgatagttatgattactattaagcattcttcgagaagctgaaatgttattaactgtcttccgaagcacttattaagagccaattattagtcctgaaaaacagttctctcaaatattcctaagatgacttccagctatagtatacatgtactttgtgacattatagatggctgcctggtaacgtagaggccaggcttcatctccaaatgtgaagagaaaattctctctctcattcctgtctcatatttgattggatgattttagtaagacttaatgacttttttgcgaatcggttaaattttctggtgtatgttgcttttcattttcttctccagaaatcttaatcctcttgaagacaggaaatgtgttaggagttcatagactctgaatattagaattgcacaattcatgaccccaggattccatatgctgtccattcaataaaggggtgacactgtccatgatgatcaatgtttagatgacaaacatctttaaatccacaaaatttctcatagaccaaagcgtttgttctagtccctgacatatcgaaccagttttttcaaagtaaatcatttgatctggtccctgacatatcaaaccagttttttcaaagtaaatcttgtgtcctgaaaacattttgaggccttaaataataccactcttgaatatcatcatttgagtaacttagtaaagactattaaaaaaatacacatatatggtaagattttgtaggatcttcttagcattaagaataaaagattattaattctttccccgtgaaacaacaacatataataataagctaaatgtggtcagctttgatttcataacgggaaaactcccttttcatttttacaattggtgttttctcttcagctgctttttaagttggcctgttagcaatttagcctgtctttaattttaagcaccattcttctagtcaggagatcccaataggaagcccactcttgtagcctcgcctctcattggctagctgggaaaagagcatttctgcataaattggatgcttccttctcccctggagaccaaatatgctcatgtttcacaatcccctggtttataaccttgagtccattgcctaaagctggaaactttcactttgtacaacagagcacactccgaaacccagatccaataccgctgacatgtccgtgggtctgacagcagattgaatacatgcttctttcttaatccagtgtttctgagctgctccaactgaaatcagaaaccgatgtgcgtgagagaggtgtccttcaaagaaaggtatttcctttgtgcagctccagtgcacacagaatccaaggggttaacgtgagagctgctttgaaaacagaggcgaaggtcactggcggcaacagcaaagacttttaaagcctgccgtcctgagcctttcagcctgccttccccacccaggggattgtaaacattggctcccagccacctcgtcccaaagcacaaaacttctctgtgctttcagcatatacatttatgcttttttatggaagttgaagcagaggcgcattattgctgtgagcccagagaacatgtctctgttcaatgaaaggggaggaatcctgtcctgccagaatgtgaaagcatgcagatacgcttatttagcggggcttcacatggaacttagccgctgctcttagtctgactttctcaagtcaaaagaatgtgtagaatgctgtcacttaatcagaacccagaagagctcttttatctgccatttgtttgtaacttgcaatattgtccttatctctttgtcctttagcttgatccagtgccctcagatatgagaactggaaacatgaaagcacttattaccttgagcattgcttcttgatttttgttggtttttttctttctttctttctttcttttttttttttttacctcagggtcccttaatcaccaacaaagaagctatgagactttttccccctaatttctgccttagtcctaggatcatatttgtttggtaatatttaaaagaaaccaagatgatttgtatatttacactgccatttatacctggttctttaaaagtctattattgacataactttgtatcattataactttcactgatcatttgcatgaaacagaatggaatttccagagatatcatgtgtagcttaaatttctccctcccaaactttttaatatgtcgtaggaggttaatatccttctgtctataagtaatttcagtcatttgagatcatctttttctctttggtaatttctaaagacacgaaccagagatatatttcaataggtaggaacagaaaaattatatcccatgtcattcctttttgctgtggtctttttatatatatataattttctatttcagagacagacatgtcttctgaaatggccactctgagcatattttgtaataaatttggatgcttacctaatgaagcgcaatcactacacatttctgtttgaacaatgatgcttgattctgaaaagaacacgagacagacaacagcctctcccatgttacatgacatgcagacatgattgttctctagcctgtagctacattgataagtgatatgtggctttgccttttgccactcaggctaaataactcttaaaggttcttcacaggctcttctggaattccaattttgctttatggaatcacaaattatattgagtaattattaatgttctttcagttttcctcttggttaaagtttgatttctgtaaatgtcaagtttctgtgaacagcatcactgacctggatgtattggtacacagtgcaatgttcagatggtgtcactgagcatgtagaatttatttattctaattataggattctggagttggaaagactttagaaataatcaaatgtgacttcttgattttgtagttgagaaactagggcctaacaatataaaattacttttttgcaaagtaataaatatacaaaggttatttataactaatatccagaggtatatctggatataaatatttatttaaaactaatatccagagtatatctggaacaaaaactcagatttcaaaatctcaatcaaggactctttcccttagtccatctagtcacataccccctatactgtgtggtgttcacagatgactaaagatgagactaataaatggccgatatttagatcatcttcagcaagtagatgaccacataaatgattatgaacagacgttttgtacactgagcatgaggcaacatggggtcttggtctttacttattcccaagggtacctggtaactgacatttcaaccattcagcttatcaacttgccatactccaatttcactataaacttctcacaatctgtaaaatcccccttttctcttgcctatttaatgtgtaacagtgacttcacatgacaacagtgaactctacatcaaagctgacaatatgaccaaagctattcacagaggctaattcatagcactaactgcttttatgactggaaaagaaagattgactgtaaatgtaaaagccttcaatccaagtagcacaaaagaaaaagaattcttttcaacaagcatcgattgtatttacatattactcattatgaaaaattaaaacatgttaaagtatataatgatgaattaattagaatatacctgtataaactaggatgcaggaaaagtttaaagcataaatgaataaattagaaaacagataataaaatggaaaaataaacctaccagttggtcctgagagtcaccttctagatcacgccagcccactttgctactaggtaatagagcttttgaaagaacttgtggcatatgagacaggatcacatagggctgggagggagtgctgatcagggtttctctgtgaactcagcccatatccagttattctcaagcctaggcacccccatttctttctctacttgtatctctttctcttaacccaggtaagaaaaacaaatacctcctatttatacatgttataggttcacaggtaaacaaaagacagggaaaatagtaacctgcaaaaaagagagtttgggcctgtgcaaaacagacattcctattaataattttccactatgcagattatgtttatagtttgtttggtaggtgaaccaaatatggtaaaaataccaactgagaagggtacaagaagtaccccgtgaagagcaaagatgaaaaaatattgtggatgtaccagagatgaaagtgagtaaaaatacttggttttcattcagaaaatttttctctctcaattttttcttctacacgaggaaaatcaaagaaaggcttagtcctgtgtagttctgttaaaaaatgaatttattgtaatattcacaaggaatttgtgttcctaaggtagttgtttttgttttttgttttttatttttgagacacagtcttactccataattcaggctggagtgcagtggcatgatgatcacggctcactacagcctcgacttcacaggctcaggtgattttcccacctcagcctccagagtagccgggaccacgggcacgcaccaccacacccagctaattttttgtatttttagtagaggcagggttttgccatgttgcccaggctggtctcgaactcctgggctcaagcagtctgcccacctcggcctcccaaagtgctggattacaggcatgagccgctgtgcccagcccaagataattttcatactcttcataggtagcagtttcatagccttagaaattcaggcagcaaggtactgtgattggtgtatatggacttatctttggagtaaaacaggcactcatcagatagtagctcttgctaattagcacatggactattgaaattccttcctgttaatgccaatcagtcagattttgctacagaacacattttacagaactttctttctttctttctttcttttttgagacggagtttcactcttgttcaggctggagtgcaatggtgtgatctcgactcaccacaacctctgcctcctgggttcaagcaattctcctgcctcagcctcccaaataactgggattacaggcatgtgccaccatgcctggctaattttgtattttaatagagatggagtttccccatgttggtcaggctggttttgaactcctgacttcagatgatccgcccacctcggcctcccaaagtgctgggattaccagcgtgagccaccgcgcccagcctacagggctttcatatgggaaagttaatacttttcagtcctgtgggtctctttaaagcaataagatggcatccttcagtttactcagtggttgctcttgcttttacgcttacatttaatgagttttaaaagtacagttaaagtacttccctgtatttgacatctgtgtctcagtactcaaattttcttttttatcaaaggcattctttacatctgaagtcttacatttctccatatatacttcagtcttttctttgaagaggtttactccctctgctggctctaactgtgaaatgaaagcacgtgtaatctatatagttctgattaccaatctgagggattgcttgcatatgatggtattgccttagacttttttctaaaatgtaaaattaaacttttgtttggctccctctgattctgaataataaaattgcccaaaaatctaagaaatattttatattccttttgagaacaatatgaaattctatgaaactaacagtgatttgataattaagaaattctggcatgcacatttacaatatgtaataggtgctcaataaatattagtttcttgattgcagtcatatttttattgtacatagacattgtgtgtgtacttcattgtaggagcaataaatcacccattctgtttaatgaagtcatctgtgtttctgtagcactttctcaatgccttattatacttccagccacacagtattacagttatttctttttacatttgcctagcttgactatgaactcttccaggacagacatgatatgttatttgtctttatagtctcagcttctgtcttggtaggttgattgcccagtaattattgatgaacttcaacattatactacaataaatgtcttctcatttgctgtacagacagccagaaagtataagtaattagaatttgttctgcactctacttttatcgtgaaaaagtaattgaaagtaaataagatatttattcagaaaagccactacctgaatgtgagcatatctgaactaataaaaatagtatagttaatacagatatatagcaagatgtcctcaccatctacatctgtaataatatatagtggtaattgactcccataatggttataccaaagccctgaaggattcttaacttttactttcatttttaatgcaaaaccaggttttcatatattttgcttgcttaaagcaagatatactagctcttatttttcttactaaattacatgcatacatatatttcaaattttattttagattatttgtgctcaaccccatacgttgtcatagagtagtgcttttcaactcgttttccaaggatcactaattctgtagaatgttaatagatgttatgtgagggggagaaagtcattcagctttgtaaatgctgaattaaatatttctttttgaacaaagctggaggcatcatgctacccaacttcaaactatactacagggctacggtaaccaaaacatcatggcactggtacaaaaacagacacatagaccaatggaacagaatagagagcccagaaataaaaccgcacacctacaactgtctgatttttaacaaacctaacaaaaacaaacaataaggaaaggattccctattcaataaacagtgctgggataactggctagccatatgcagaagattgaaactggaccccttccttatatacaaaaattatctcaaggtgaattaaagacttaaatgtaaaacccaaaactataaaaacccacaaagacaacctaggcaatacctttcaggacataggcacaggcaaagatttcatgacaaagactccaaaagcaattgcaacagaagcaaaaatggacaaacggaagttaactaaactaaagagcttctgcacagcaaaagaaactatcatgtttcttttgagtaaacagcctacagaatgggagaaaatttttgcaaactgtgcatccaacaaaggtctaatatggagcatctataagaaacatacaaatttacaaggaaaaaaaacgataaaaaagtgggcaaatgacatgaacagacacttttcaaaagaagacgtacatgcagccaacaatcacgaaaaaaagctcaacatcactgatcattagagaaatgcaaatcaaaaccacaagagatattatctcacaccatcagattgctattattaaaaagtcaaaaataacagatgctggtgaggttgtggagaaaaaggaatgcttatacattgttggtgggagtgtaaattagttcagcctttgtagaagacagtgtggcaattcctcaaagacctaaagacagaagtaccattcaatccagcaatcccattgctgggtatatacccaaaggaatataaatcattctattataaagacacatgcacgtgcatgttcattgcagcactattcacaatagcaaagaatcattttctttatcattcatgtatttctttatgggtatttggaatcaacccaaatgaccatcagtgatagactggataaagaaaatgtggtacatatacaccatggaatactatgcagctataaaataaatgagatcatgtcctttgctgggacatggctggagctggaggccattacccttagcaaactaacacaggaacagaaaaccaaatactgcatgttctcacttacaagtagtagctaaacgatgagaacatgtggacacatagaagggaacaacatacactggggcctattggagggtggagggtgcgaagaaggaaaggatcaggaaaaataatggatattaagcttaacacctgagtgatgaaataatcagtacaatgaacccctgtgacgcacgtttacctgtaaagcctatgagccttgtaagggcaagaaccataccctagaattcactggcactgagtgttggccaccaagtagcactctgcaaatgtttgttgacttaaaaaaaataattcctacactaattcagagtttctaaactacaaggaaaaaatggcagcatgtgtacactgattattgtccttcagcctccctccgccaaaatagttgctgtggttccccatttttaaattctgtgcgtgggtgaatgggaagactcacaacaaatggaaatgtgactgcgtgacctctttagagggaatgtggtttgccccttaactaagctacagggctataaactgacaaatatggttctatgtttagtgtataatgatgtttcagaattatgtccatagaagaaatctagtaaaaactactatccaacagcttctaaaatgtttacattattaatgttcaaacaaacatttcagaatactaagttcagttctttttcaatgcctaaattgtctaagaactctgtgtgtgtgtgtgtgtgtgtgtgtgtgtgtgtgtgtgtgtgtgtgtgtgtgatgtatatgtagtctatacacctcaagaggaggacaaacagatgcttaaagagttgggagtttgctaagtccgacatagaagggacaaaagtcagaaaaaaagcctaatattttacagttgtcttgaactactgagtcacacagtagtttaagacaatttaaaatgttagtcacaaatgacagacactatttattctgtcattaccaagaaagtccagttagtgctttaataaatccagattatattatccttttagaatacaaattattcagtcaaaagtatagaaagtaccactacacactaattcgaatggttgggaatatcaactgttggccaagatgcggagaaactgtaactctcatacatttctggtgggagtgtaaaatggttcaaccacttggaaaactggtagtatctactaaacgtttgcctactccctgtatatacccaagagaaatgcatgcctgtatccaacaagagacatgtacaaaaatgttcaaagcagaatgtttattttactatatccaaaaactagaaataaccatcaacagaaaaaattgctaaacaaactctggcataatgatgcaatggaatactacacagcaatgaaagggagaaaactatatactgataactacaacagcatacacagtttttacatattatcttgagcaaaagaagcaaaacacatgattcctttatatgaaattcaaggagcagcaacattaatctatggttatataaataggggtgcaggaatggtattgctaggaaaaatacaagaggaccttctgtggtgatggtgatgtaagtattctatatgttggtctgagtggtgtttatataggtgtgtacatgtgtaaagatacatcgaacatgttaagatttgtgtacacctcagtataaatagataaataaatgccttaggcaattatacatgtatatgaaccaatgccaacagaggccaaaattattctttacaagaaatcttttttaagctattatgtataaattttattctattgccgtagttgttaatctagaacacttttcataccttcagaattacacaaacacatggattttttcctccttgttttgatttgctgctttggacagagttcattttttggagtttgggggcaaatttggaagaacttctttatcagaaaagatacttttcttggtcatacatttaacaaatagtcattgaatgcttgccgtgtgtcagatattgcactaagcattggggatccaaagattagctagtaaaccccagtccctgccactgtagcattcaattttatgggggtaacagagatggaagcagattcttctggtcacaccagatgtcagcaagggctgtaagagaggtgtactgcaggagtgtggagtaggaatctgcttcgtctctcagaatattctggaagactttcacagagggtatcacgaggccctgcttctatttttgccatatgtcagagttctcttttaagtatctacaatagtgatttaaaagtacttttcttcacaatctatacttccaacaaaggactaatatccagaatctacaaggaactcaaacaaaatcagcaagaaaaaaaccacaaacattcctttgaaaaagtgggctaaggacatgaatagacagttctccaaagaagatatacaaatggccaacaaatatatgaaaaaatgtccaacatcactaattatcagggaaatgcaaatcaaaaccacaatgcaatactgccttactcctgcaagaatggccataataaaaaaaaaaatggatgttggcacaggtgtggtgaaaagggaacacttttacactgttggtgggaatgtaaactagtacatcactatagaaaacagtgtggagattccttaaagaactaaaagtagagctatcattggatctagcaatcccattcctgggtatctacccaaaggaaaataagttgtacgaaaaaaatacttgcacatgcatgttatagcagcacagttcacaattgcaaaaatatggaaccagcccagatgcccatcagtcaacaagtggataaagaaaatgtggtatatatatatttcattatatatataatgaaatactactcagccataaaaagagcaaaataatggcatttgcagcaacctggatggaattggagacgattattctaagtgaagtaactcaggaacgttaaaccaaacatggtatgttctcactcataagcaatgaggatgcaaaggcataagaatgatacagtggactttggggattcagggaaggggcgggaggagggtgagagataaaagactacacattgggtacagtgtacactactcaagtgatgggtgcaccaaaatcagaaatcaccgctaaagaacttactcatgtacaaaaataaataaatacataaatgagaaaaaagtactttcagttactaaaagatagttaaaatatgtaatacatgtttttcttagatatcactgtgatcacttctgtgattccaacaaatttagtttaaagatctcagttggctttattgcaattctagaaatgggcaacaccacattctgtaaaatagagtaagtgttccagttagtcaaacaaaggagagtggctttatagacagaaaaggggcagaagaaagcagaaacaaaagaacggaaagcagcttggtcatttcaaagttacgtccatgtaagggacagggagacagaacaatagataactgcttaacatcaggttacttcaagttactctattgtaaagattaaaacagagggaacttcattgtcatgctgatttaagatagaaactggcctgtttgggaaattaggctgtctttctcttttgacttctctgtctctcctgatttacccagttttggtttggtgagcataagtgactccattttaacttttagtccagtctgttggggcctagtgcaggagtttagtgcaaaataatggtatgctataatttttgtggaatatttcttaggccattttgaaagccctaacagtttccaggataaaagaagctacctgccacaggtttctagaaagcagtaacattctttgaaatgtttataaatggaaatatagcgtttctttgaattagttctgagttagaagccaagttttactcaaactcagagggttacttttcctttcaagtagtgtttgcatgcagcaaccacactgcccccaacacgcatgcagcatgagtccctgagtctaggtgagaagccttccgctggtttttatgttcacacatgtatctctcctgacagcggatatacctagaaatactctgtaagtccttggtattagtgtggttcttcctagaaactgagacaattttaagaaaagcattgtggctcattaagagcaaatgaatgtatatattctgtaattatttaatcaacagaactatattccctttcaatgatcctttctttcatctctgctcatagaagagatatgaaatgaattttagattttgaggacatttaaaattcagtaagtacagcaaaactgtgttataaaagaaagaggaaattaaataaagggctaggacacatattacatattagacctttttttttagcaactttgaaatcagatggtaaaatctagataatgtcgtcgagtccatacaattgcactgtgttcaaaaccaaagaattcttatgtcaagtaatatgattttttttaatgttgcttagtgactgtgttagaaaatggtgggtcatagtatttaggttccctaaattgtgtattttccttctctcctatttccacagctctagtcttctgtgcattttgtttttttgtaaacaagaaggcaccctttttacactacatctgcataaatgggtgaggggtgattttgaggaagagcctgacatgggcagctggtgagatggtggtctcatttgcagagatagaatacaaaaggagaaaatgttagggaggaagggtgatgcctggtcttcagggaagggatctagggaacagcatagacatgcctgtgcacacagtgcccgacttctggctcctgtgcagaacattgtgggtaggcaaaccttccctaccctccatccaggacccagtcatttgcacatccatgaccctgatccctcaactggcagctatcttggtgaaatcccttggggtcccattatcttagaaaaacaacttcttttgtttttgtcagcttttctggtaaactgcattactatggaaatgttgactattctggaaatacaaacttttttattgtaattaggcttaagaccaaaaaagaaaagacctgaggtcatttagactccacagtgaggagaatgaacctgagttcaataagacctgcttcagatcctggttctgccattggctcttctgtgattctcagcttccttatctgtaaaaatagagtcgttgatactcgcctcacaccattaaactgaagattatataagacaacagataaagttaattcagcgcagtacattacatcttctgtgctttacaaatgtttcctttctctccttccgtagccccctacttatttacactcaaaataaaaatgaaaagttttagagaagagaaaacattacaaggccccacagtaatccattctggtatttaacagttcttattgtcagaaaatacttccttctgtctaacacaaattcctaatgctgcaatctaagtccttctctcagatgtgtcctccttttctgtttgcagttttaatcttgctaaatgaacagcatgaaacaccctaatcttcagaagcatattttctttatgtctttcctttaatagcttaaagcacaaaatatagtggggaccccccccccaccacagtcctctgtagactataaattcatttctggtagcctggattactgggaaatgttgtggctggttttattttcctgcatgcatctcgatgacccatttcagatgggagtgtttgaggaggagagcgtactgcagaatgagctgaatgagctataccttcatgactgcttccacctgacaatctgcaaatcctccccatttaaggaaggcagtgctcatggaattttaaaatgttgaagaatgtgtgtgcctgaacttggattttaaaactatgcttccatttccctcatcacttgcactaaccatataacctgctagtactcatttagtaggtttgcttgcaacctgtgtcaaaaggagcatagtaaccaatgagaaagaaggcacggaccttagaggcatttgactgtttccatagcaaggaaaaacccaatttttaaattcttttacaaatctgagtaataatgtggcctctcaaagcaaatagatttccttaagagttaaaacaacttctaagaggaaacaatgagccctgcagcctgccatatcctgtgttcagaataattttcatttctacttatctgtgaaggttgaaggaatgtctgcaaatatttgcttggtttctatggtgaaagcagagggagatcaaatgtatgattgtttagtgtcaaaatcaaaactatactatactgtacttctacaaagagaatgagtttgttactttaaacataatagacgtttaataagtggtaactattttaagtttcacgagttcaagaggaaatttaaacagtgcagcctgaaggaaaacataggcccttcaggcattttaaaacttcattttacaaaaataaaatggtccttgcactttattaaaaagtcatctgttgactaaagatcatgttggtggactctcagaatgcctggtgtggacatggggacacaactatggcctataaaatttatactataatagaaacactctgtcctgccctgtgttatccctccttatcctgtaactctccattctgctgtcttctggctacccatacatttgttggaacatatgtttattttatgcttgctttatacaacactctgcgagggactgggattaaaagtccacttagaaatactctctaccctcaaagggctggctttgggcctagtagaccgtaaggatacaatgattgagatgcaatgtaagtgctgcaatcatttatgcttgcggaggactaggcagggcaaggttcacaggaattaagaatggggttgtgaagagggcattccagagaagggcctatgggaagaccacatgaggcacgacatagcacacatgtttaaagaacctcacggtctctgacaagttaaagaaagccttcatctgaagggggaacagacaatgaaggcagagagtgggtgggaaccagattatgagagcattggaggtaaattagagttgagcttgaccctgaaatctccagagaatggatgaaggattttaagcaggagagtggtgagcacagcttcagatgcagtaaagaagacagagtggcagggggcatgttggcaggaaaagaccacagaggaagctatttggaccatccaggagaggacatgctctcgatggaattgtcgggatctgatggtggcttcattgaaagtcaagagaagtagggaaactgggtaggtagcgattttgcttacagagagaagaaatataggaaaagcaagtttcagaggaatgacaatgcatgcattttgaatttgagatactggtagcagcactaagtagtgatgtccgggagacagttggatttgtgggtcagagactgcagagttctgaatacagcatggattggagcgggggtggggacaggcacatggagtgctccacaaggattgtgcttcatgtaagaaaagtgactgcctgaggatgtcgccttagattaagcaataatttaaaagagacaaaggcaggaggaacactaggacaggaccgtagcattctgcacttaaattgctacacagacaccacccctccctccaacccagttgtacttcagccaactcatttaactcattgctttcctaatttgcgaccacactgtccaggactaacatggtacctcacagagtagacattcacatgatgaattgactggaagcttactttgacctaaaggcttgctgtctaggccttttgtaggtagatctgcttagacatagataaaatgggggagaggtgtacgactcagtaagaaatggcaagtgccactgatatcacaaaaggtcagaaacctggatccctgaattctacctttgctggtccttcagtgagtcattttcatccctcccctgacacgagtacacagcccccctgtttactgagtggctctcttcccccaagatgcctttcctctctacttggagggaacacccattcagctcattttccctgtgcctttcattgccctgtgagtcttcttacacaatctctgaagctaatcaggtagtgctcttccctccacaggatcatttcctctgttaaagatacatgattactcaaagatattaagttattatgggacagtattgtcctcatattctccagtctaggtgattgcctctatccatcttcagcactgccactgggagtttcctgtggttattgatgtatctagctatcagataattactgagcaccttccatgcatgacactgtaaatgtattgtggccaagaaatggaaaagctataatgcaagatagaaagggtcaagtactatagaagtgcagtggaagctcagagaagagccattacttccagctgggagatcaggaaaggctttgtggatgaagcaatatgtgagtgaggcttgaaagatgggtaggatctggacctgcagagactcagagaaagagaatcccagagagagaatcagagaaccacaccagcaatagcaggtgatgggacatccacatatctaaagggagccagtggccccatgtgagccaaggcagctgtagatgtgaggaaatacagcccttctgctggtaatggatgcatcagagcagaggtgaggacaaagttattggcacagcgctccctgctgtgagactctcatctttgtattgacctcagacatttttttgccatatgtcaaaacatctccttctagcccttagattacaaatgggtgaatttgagatgactccattattattttatgggtatttaatgctttttttttttttttttttttttttttctgagatggaatttcactcttgttggcccaggctggagcgcaatggtgtgatctcggctcaccgcaacctccacctcctgagttccagcgattctcctgcctcagcctcctgaatagctgggattacaggcatgcaccaccatgcccgactaattttgtatttttagtagagacggggtttcaccatgttggtcaggctggtctcgaactcccaacctcaggtcatccgccctcctcagcctcccaaagtgctgggattacaggtgtgagccaccacacctggccagtatttaattcttaatagtttccataaccagttaaggtgttataatgagaagactgtgcttggcagaattagaattccaattctttataatattcttcatttaaatatgtaattttgaagaactaaattatggccgggcacgatggctcacacctgtaatcccagcactttaggaggccaaggagggcggatcacttgaggtcaggagttcgagaccagtctgggcaacatggcgaaactctgtctctaaaaatacaaaaaattagccgggcatggtggtgcacgcctgtaatcccaactactggggaagctgaggcaggagaatcacttgaacccgggagaccgaggttgcagtgagccgagatcacaccactgcactccagcttgggctatagagtgacactctgtctcgaaaaaaaaaagaagtaaattttgcacctctgtgaaaagtcagtgaaattatcactagttttgattttcacttcacacaaccatactagttttctatagggagaaaaacatatgtattagaaagttttatattgctctgatgcaaataaacagattagagcacagtttagaaaaccttcactttgacaaaataaagattctgaagtatttcaaagattatatttatattcctgataaaccattatctatgtttgtatttgagacatgttgttgaagtgggcccgagaaggagaatatcaccacactggaacactccataagtaattactaaaccaaaggacagcaaagatatttaacgataacgttgttgggtccataaagtatatatgtttttttaaatcttcattgccattgccatatcatttagggagtcttaaaatgttaacagaggacaccttatagattacccagtccaaacatcttctttaacagatgagaaaactgaaacttggagaagaagttgccacccacgctggtttctccatctataaacaggatgtatcagccagggtcccaacaggaaatagatggcacactcaaactcaagtagttcaaggatttcttgacacaggcatgatttgcagagatgtgggcttaggggaactcaggggatggtgctatgacctgagtcttactcgcagtcagttcattaccattcccaggccctagaagaagaggggaagcagttactggaatccaggaggaagaaagcaagtagagcaggcttcctgagatggacattgactttgtggtggcaacacagtcagttctagacagctttgctgggaggaaaatcaaagagttgaggatcctgacctcatgcttctccttctctctgaattcctgccgagacttcccattggccaaagccagtaagaaactggaggcatatggcagatacaggtccatttctagggcagagactatctggggcaacaaaaagaagacatccagcacagtgttcataccatgcttttctgccattgtggccatataatgaggatgaatcagataacatctaattttttcaagaccttggtgaaagggtacatgataaaagattgttaaatataacatcaagtgagagcggtttactctgaaatgtattttaagtcagagttggccttggctgtactttttcttatactattattgaacaggttcaaaaaaatgtgaatagagatcaaagcagtttaaacagatacatccacttgtgtaaatatccttgaactcccccctgccttccgctccccctcctgttgccacatccattcagcacctctagaggctgttaatacatgtaatgattgtaataaacatggtatttgctttggttccagctggctccaatcaccaaactctgtccataattcctattgtctttgcttactagacaactgcattgttaccattagtagcgacttttgttacggatttctaaatgttgatctttatatattgcactcattgttttcctcaacatgttttaaaatttaaatttaccattatattttctttttaaggatatttagaattattaaacagaacttctggtagaattgattatattgttgagaactttcacgagctaaaaccttgaaacaattttattgatattattcattctttataaagctttcaaataaaaataagcttctgctcatgcatgacttaaactggttttaagttcagcagtcttccatcagaagtttttagaggcacagaagtataataatgtctaagcaaagggaatttatattttactgtcaggaaaatttgttgcaatttgttctcaaaaacttggatccagatttagttgcagtagatattttaaatcctatgaaattacagaagttgtcataatttgagataattaaaatttcagtgacttaatgtagggactgaaagactgtggttcagaaattatagaacagccaagtaaattaacaaattaaaactggggatgctctcttgatatatagaataatattacataaaccaggaaacaactattagaaaatgctattcttttatatctattgcaaaatatagtagtttgttttccttttttttgagacagtcttgcttttcacccagactaaagggatacaatctcactgcaacctccacctcccaggttcaagcaattctcctgcctcagcctccctattagcagggattacaggcgtgtgccaccacacctggctaattttttttatttttagtagagacagggtttcgccatgctgcccaagctggtcttgaactcctgacctcaagtgatccgcctgcttcagcctcccaaagtgctgggattacaggcatgagccaccacgcctggcccagtagtttgttatttttaaatgtaggcccaggtcattgatggggttattttattagagaattaactagaaatgtaagtcttgaacaatttatactttcttttggaattgaattcctcaaagattgaaccaaaaatgatgtctctttagacagatgttgatagtttaaaatagagtgtaagcataaagttagtctaatttcactctcacttggttacaatgatttacacagactagagcaaaatcttaaggataaaaacgagatatctaaattttagctttcattgaacttattaaatgtgaagtgatgagtagatgtcatatcatatagagaactggaaagtaatggaaacgcttttctttcttttttttttttttttgagacggagtctctctgtcgcccaggctggagtgcagtggcgcgatctcagctcactgcaagctccgcctcccgggttcacgccattctcctgcctcaggctccccagtagctgggactacaagcgcccaccagagttgtaaattttgcaactctgtgaaaagtcagtgaaattatcactagttttgattttcacttcacaaaaccatactagttttctttagggagaaaaacatatgtattagaaagttttgtattgctctgatgcaaataaacagattagagcacagtttagaaaaccttcactttgacaaaataaagattctgaagtatttcaaagattatatttatattccttataaaccattatctatgtttgcatttgagatactgggggaaggaaaacagaaactcaactctcttttagagtttgacaaatgaagtatagaaaaatataagtaaggatttatataagacaaacccttatcaataaagaactttacaaagacagtacttccattacactcccagaacaaaaaccaagtatatacatcattttaaagaaaacaacaataaatcctaccaagtagaaattgtacagatcatagtctctgttgtaattcaataaaagtagaaattcaaccattcaaagatagccataaataacctgaccatatggacatcttaaaacacttttctaaattaaagataaattacatagtatttaaagatgagcaaaaatgagaaaagtttatctacaaatatgtagttagcattttattattaattaaaatggaaaagaaatgagctaaattttaactcaaaaaaaaactcaacaacaacaaagaaattaggagaaaattttaaaagataaaaatagaaatcaacaaattataaaataaaacaataatcctcccaaaatggaaataaaattatgtcagtttttttatataaataatatggctaaacttctgacaaacctgacagatataaagagaaaacaaaaatttacaacattaagaaaaagaaaatcagtataaccaaggaaacagatgaaattaaaatgattataagaaatactatgttcaaatttaagtcaatacatttttaaatctagattaagaatgttcgtaggaaaatcctttatcattacgaaaattggcttctaaagaggttgaaagctgagcagactaattaccaagaagaaattcaaaagaccgttaagacacactgctaacaaagatccagacagctctatgagcgagattgtttgaccctcaagaaactgattattcttctgttgtttgtactattccagaatataataaagattggaagcttgaatatccctgataacaaaacatgaaaaattaacacaaaaaagaaaactacagatcagcctcatttatgaatataagtcaatatcctgaatagatactagcaaatagaatttcagagtgtcttaaaagaataatacacaatcagaaatgatttattccaagaaggcaaggatgctacaatattgggaaatctgttaatgtaactaatacgtcattaataaaacaaaggcaaatgattatatggtcattattaatagacattttaaaaagcatttgataaaaattcattctacattttgagtggtaactaaattttaaaaggaatagagggaatttccctaacatatcaatattgttattatgattttgactgtctatacatttatttatcataataggtataactgactgaagtattgaaaatgaagacagtcagccttactaaagttttttaggatgggtaatcaatcagaaaccagtttcttgctgagcacagtggctcacacctgtaatcccagcattttgggaggctgaggtgggcagatcacctgaggccaggagttcatgaccagcctggccaacatggtgaaaccctatctctacaaaaaatacaaaaatattagccaggtgtggtggcgtgtgcctgtagtcccagctacctgggaggctgagacacgagactcgcttcagcctggaaggtggacattgcagtgagccaagatcgcaccattgcattccagtctgggcaacagagcaagaccctgtctaaaaagaaaaaagaaagaaataatattttccttagaacagcttaaaataaggctgtattcagattaaacttttctttttatgttgctagactttattttgaattgaggtagaaagataagtgtgtgccttcatgatatctgtgtatttctgtcaaccactcaagtggaaccttacagacagtttgcacctgcagttttgtttacagtgtgtcagggaagcaaagaagtgttcctccagctagaaatattaataaagcagaaacaagtaatgtaactaaaactagaccccagtattggacactcttcttagcaaaaacaataccttcccttttggaaatgactggtcattgaattttgcccagttatctttctaggaatgattgccttaaaaggattaatttgataggtgtataagcccttattgttgtgtttacagtactgtgataggcatttacagatataaacatagattaaggcagggccatgtcctcaggaacaaaccatattatgagctatgttacaaggtatgattttcagatagcagctggtgctgcaacagggtggtgctggcatctaggctaggccttgtagaataggtgaaatttacatatgtggagaggagaaagaagagttgcccaggctaggaaaatgatataaacaaaagcatggagacaagagcgatgggatatgcttgcataatctagtggtgttcaaacatagccaagggtgaggattagttgaagaactcaaaaaaaaaaaaaaagaagaaagggggaggcgcagtggctcatgcctgtaatcttatcactttgggaggctgaggcaggcagattgcctgagctcaggagttcgagaccagcctgagcaacatggtgaaaccccgtctctactaaaatacaaaaaaaattagccgggtgtggtggcgtgcgcctgtagtcccagctactcaggaggctgaggcaggagaattgcttgaacccgggaggcggaggttgcagtgagctgagatcatgccactgcactccagcctgggcaacagagcaagactccatctcaaaaagaaaaaaaaaaaggaaggaacaaaagaggaaaactccaacccaaaaagttcagcccacagaaagtctaattcagtggcacaagataagacctatacacctaagtttttctaaaaccccatggggattttgatgaacaggcagggttaaaaaccagtggtgcagtatagatgtgactaggatataaaggctatggaagttctatgggaggtgatgcattgatggaaaatactctgggaggtgatgcattgatagaaagatatgttggggccaaatggtaacttgagtaacattgtttcagtattgtcagttttgtgttttgttttttatttctattatatcacaaccatccctccattagatatcaaccagtattacttaaacaaaacttgacccatgtgtgaattcaaagcaaaatatgttagatgagatatagagggggaacctgtcaagaatctttttccaatttgatgttgccatataatcatctaaagacttaaaacggtcattttattatcactcataatcttgtcagttgaccggactcagctggcagttctgctctgtgtgacattgtctgggactgcagttatatgggaggtcagttggcttgaatgtccaagatggctcattcgcaggctttcagctgagagctcaactggggctgtcaaccagggcatcttcatgggcttctcacagcatgacagctgggttccaagaggtagcatctcaagagaaaaggcctaggctcaggcttcttatgacctaacattggtagtctcagacattacgtctaccatattctgtaggtcaagtaagtcactaaggccaactcagattcaatggaagatgaataaaatccatcccttgatacgagcaacagtgtgtgcaaataaggagagaaggaaattgatggcagccgccatttattgagacttgctactgcaatcttagcacaccaagtaatatagcatcaaaatatataaagcagaattttagaaaatttagatagacatccataataatacaactagacaaaacaataaggataaaagggatctgaataatataaaattctgacgtaatagatttatattctgaattccttatctgacaataaagaatgcacctcccagggtatccatagactatctgccccttcccccacaaaaggaatcacttgaaccccccctatgtactcaaatctgcagccttaacatgatatgctttcttcagccctcaacctggcaggaaaaattgttgtgtttgtttcatctattactatacgctgctctgtattaaatgagtttcttgtctttttggaatcccttcctctgcttggctttttcacacatcatatgaacaattgggttacacattctctcttaagttcttccccactttttacttgttttctgaaaagagcatcatggagaggggttttactttgattccccaagctgtcacggtaagagcagttttgacatgtcctgggtgttgtgtagacttcagggacaccatccagcagccctggcaccatcttcatatatgtgtgtgtgtgtgtgtgtgtgtgtgtgtgtgtgtgtgtgtgtgtgtgtgtgtatgtgtctgtgtgtgtgtgtgtgtatgtgtatatatatatatatatatatatatatgtacagcttttggggtacaagtggttttgggttacatggatgaattgtatagtgatgaagtctgagattttagtgcccccatcacccaggtagtgtacattttacccagtatgtagttttttctccttcacccctttctctaccctccccctttctgagtctccaaagtccattacaccactctgtatgccatcatcttctaatctgccaataatgctggcctggggattgagctgtaattgttgccatcacctgttttccatgtattattttttaaaggcccttaaagggggggagaaaaaaaacggtttctaagtttaaaaaaaatttttttggtctttgctttctgaaactcatgttattatgccatcctagttagacatagagttggaggtgggaacccagtttgtggggatgatgtaatttcctggcctgtcagtgatgagtcctatttacctattgcttctagcgcagtgtccttatatgatttataggagttctttctgaactacatcttgtcattaaaccaccaggtttagtcaggagtctaagccaacagccaccttctcagtaacacttggatccgcttgccattgcaggtcgtcacgctgtggtacagagcacccgaagtcttgctccagtccagctacgccacccccgtggatctctggagtgttggctgcatatttgcagaaatgtttcgtagaaagtaagaaatacattttgtttcactctgctttccttgaaaagagactgtggatctttgtgaatttgagtggcagcatggcatttctatcattaggggtcatgatggccagatccatctaccccaggctaccacttgcaagcctgtcctgaaaccgccttctcagtgcttacagtgttgttttatatgactgtagcttgcagcttctggaaactctgcctgggaaggaataccccactgttcttataagttacattgttttactggtgatgataggacatggtgaaaataacacatattttcgcatttttttagtgaagaaatatctcaaagtggactttatccataggaggagaaccaaggctgttaagtgtatgaaaacttttttgatggaattttgatagtgagaatagttgaaaaaaacaatatttaggctgaaaaagaataggcagtggggatgtcagtgctacttcagagcactttaaatgctgccgtgtacaggagagattagatatattcaggtactatagaggacagaaacaagaccaaggatacagaaattacaaaaagaaagatttttgttaaaaggggtagaaatctaatgattagacagttatctgaagagtggattggggtttgtgagaatagtgagttttcattgtgtgtctaagaagaggctggacctccacacattggtgatgtttcagtagcatttatagggttggtgcgtaggctagatgccctctaagttccctctaagagagcatgtgattcgtttgtttgattttcaggtcacaagaaatagccaaataatataataaagatctgccaggaaaataatccatatctgggtactaagttcagcctagtctaaattaaacagagaacctaatcataatctaatcttttttttcttttctatttttatttccatgggaaaaggtaagttaggaaacagtatattcccattgtatctttaaaatgtagctccatggtagctcacaaggaaaagaagtggtcagccattgcttgcttgttgtttggttggttttaaccaaacaaagttttgtgcatgtaacaaatttttggaactgttgctagtactcagcaaattcatctgtggctcataggataggagatcatcacaaggagatcagagtaaacagatgtttaatgcagccataccatgtgccaagtatagtgtcaaacctcttcttttatgctacctttcttagtcctaccaataagaacaaactgagatggagtggtacatttatttgtctaacattaggcagctaagaagtagcaggggtatgagtccaaaggaagcttgcaagttctattctggtgttgcttttttcccaaggagcggggagaaaaagtaatactgaaatcagctgcagtgtttgccaaacaggctaaattagtgattttgaaagtatggtccctgaaccaggaacctcagcatcaccaggcaccttgctggaaatgcaaattctcaggccccaccccagacctattggttcagaagttcttgggctgggagccagcaacctgtgtttcaacaagtcctccgatcctaatacagcctccaggataagaacccctgggttggatgacagtatgaccagggatgggcagtctttaaaagtctggctcccaggcctctcccttgagattctgattcattactgggctggggccaggaattcttatttttaaaagtaccttcagcgattcttttcatccaacaagtgtagaagacattgggttaaaggcttatggttagaaccaagaataatttactgtcaatagagcagagtaggagttaagacagtcattctacttcatcgcaggaataactcggtacagccaagagttgattacagaaatgcttattggaattatctttatgtgtctagaatagtctcaactgtaaagacagagtccttcaacaattacagacttgaatactagtcatgattgatgctaaaagtcaatttttttaagatgttaaaagaaagataaaattttatatatgtagaattaagtattcactactaaggaatttgctgtataggcaatctccatttgtggaacaaattttattttaaaatgttaaaagcattttccactgaagtgataagtggtcactggattccaagcctagcttgcagaatcctctacgacctggaacatatacaaaacacccattgtgctaattcatcaaaattttttcttctgtgggaaaattcattctatgttccaatccaagactagaggaatacttatctctccatctcagcattgggactgagaagtaggactcaaatattggaggctcaggggagggttcctttgatgatagtggcagcagtctgcttcagtttgctggaaaagtgagacattgggtagagatcctttggcacttcaaatgtgcacataagaaagtaccctttctccagaagccttgcacaaaaatagtaatttgagaaataattgcttgaaggaggaagcagtatcagaaaccaggttcatatgcctttaaggctgaaaggagagtgaatcaaggccaatcataccatccctcctagggtggctaccctgtgtccttggtatttcctatgataccccccagatatccatgtgtcatgcttcttacttatgccagatgagttctggggtccatcaccagcttgacctggttctgacttgactcctgattcagtattgacccagttgagacttcacaagccataggctcttaaagcagactcattcattgctttaggctaatcctaaatcagggaatcctagcatcttttattttttgtagagatgggggtctcactgtgctgccctggttgtcttgaacttctaaactctgggtacccacttgatgctaaggcagtagttaccaaattttgtcctttctttatcaccttcattgtttttgccatattcttatgagactggtactattatttacgtaggttttttttactactctctgtcagtttacttttttatttagcctcatcctaaacaaaagtacagtcatgtgttgcttaacgacagggttatgttctgagaaatgcattgttagacagttttgtcattttgcgaacattgtcgaatgtacttacataaatctagatggtgtagcctactacacacctaggttatatggtatagcttattgctcttaggctgccaatctgtatgacatattatcatactgactaccataggcaattgtaacacaatggtaagtatttgtgtatctaaacatagaaaagatacagtagaaatatggtataaaaaataaaaaatgatttacctatatagaatgcttatcatgaataaggcttgcaggactggaagttgctctgggtgagtcagtgagtgagtggtgagtgaattgaaggcctaggatgttactgtacactgctgtagactttataaacactgtacacttaggctacactaaatttatctaaaaatatttttctttcttcaataataacaaccttggcttactgtaacatttttacttcataaactttttaaattttttggccgggtgcagtggctcacgcctgtaatgccagcactttgggaggctgaagcaggtggattgcttgagctctggagttcgagaccagcctgggtaacatggcgaaaccctgtctctacaaaaaagacaaaaattaaccagacatggtggtgtgtgcctgtagttccagttacttggaagactgagttgggaggatcactggagcccaagagaggcagaggttgcagtgagccaagatcacaccactgcactccagcctgggcaacagaaggaggccctgtctcaaaaaaaaaaaaaaactttttaaattttttaactttttgattcttttgtaatgacacatcttaaaacacaagcaagccagatgcagtggctcactgtaacccaacactttgggaaaccagggcaggaggatcacttgagtttagaagttcaagaccaaccagggcaacatagtgagacccccatctctgcaaaaaataaaaaattagctgaacatggtagcacacatctgtagtactagctactccggaggctgaagtgggaggatcactggagcccaggagttcaagatgacagtgagctaggatcatgccactacaccctagcctagataaccttgtgtctaaaaaaaataaataaataaacacaaaaacattatacatctatacaaaatcttttctttatatcctcattctataagcttttttatttttaaattttttatttttttactttttaaacttttttgttaaaaactaagaaacacacagattagcccagacctacacagaatcaggatggtcaatatcactgtcttgcctgtccacttcttgtcccactaggagggcttcaggggcaataacatgcatggaactgtcatcccctgtgataacaatgccttcttctaggatacctcgtgaagggcctggctgagactgttgtacagttaacttctttttataagtagtagtacactctaaaataatgataaaagtataatatagtaaatacataaaccagcaacagagtcttgtattagcaaatattatgtactgtatataattatatgtgctatactttaatatgactggcagcgcaataggtttgtttacaccagcatcaccacagacatgtgaagtgagtaatgcactgcactacaataacgttaagatggctaggagataggaatcattcagcttcattataatcttttaggaccaccctcacatatgtggttcattcattgttgaccaaaacgttattatgagggtcatggctgtgtataaaaatcagagatttgaccggttatttatttgtctgatacacattagaataaatatataaccactaaaactattcagaaagttcatgcatgtttatcccctaaatcatctcacatgtcaccaacagtaatatgtcacatgttggaaaccctataacaagtgttccattcagtccacaattaacttatggagtgactgttgtatgccaggcccacttctagaggggtgacttaaatcctagtagagaaaaaatccattgcctgcacaattagttaattaaccagaggtgggataaatgctgtgaagaagtgtagagtactgtgagtgggtataatgacaagtctgtttttggagagggaagatttctcagtggaaggccagcagttgggattaaccttctttagaggtcgcatcctagttgtttatttaaaatctttgaggaatagtcatttatgtgtcagcgaggctcaccatcctccataacctagggagaagaaaagaagcaaagggagttaccatttgtcatgtgacaggcccatgccttggcagttgggggttgggggcaccttcatgtgcattatctgcttaaacccctattctgaagacttctttccagagcttacagataatgaactagaccttccacaaggagggtgaataacttgcccatgggcatacaacaatcaaatgacagagccaagaccccatgtctgcctgactcgatcgcctttgatttttctactctgctgggtttctgccattgctgttgtttgacctactaggccatatttttttctgtaatgatttgtgtattactgtgatgtagcagcaatgatattttagagtggtcaagaagcaaatcacacatgtatttaatagctttgatttagaatctgtcctgtattggaaaggttggccaattctctgtcatattattaagaggtgcatgtcttttgttcaaaaatgaaatacctaggaaatataaactcagtaaagagagtcatagggcagatggttgacaaagagccagagagtttaaatatcatctgtcactgttatctgggtttaataactgcccacactggcccacagaagtattctacaaaatgggtaagagctacatttttttatctttctcctttaattcttcatccagagtaacccatccttactccacattgaattgtattttaatactaaaaaaaaattgttataaatttggttagtggccaactagtcagcttaaaggatgagattggatggatggatggatggatggatggatggatggatggatgattggatggttgtgatagattgatttttaactatacagcaaaataaattcacagtattaactccccaggtatctattggttgccttgtaatcctagttagaactgtctgtagtttgaaagttatggggttttccaggttacagcaaagtcacataaaatgcacatttagaaaataaaacatgcggccaggcgtggtgactcacacctgtaatcccagcactttgggagcccaaggtgggtggatcacgaggtcaggagatcaagaccatcctggctaatacagtgaaaacccgtctctattaaaaatacaaaaaattagctgagcgtggtggcatgctcctgtagtcccacctactcgggaggctgaggcaggagaatcgcttgaacccaggaggtggaggttgcagtgagctgagatcgtgccactgcactccagcctgggtgacagagtgagactcagtctcaaaaaaaaaaaaaggaagaaaaaagaaaataaaacatgtttctttgaatacgaagattgtggcaagcagatagtaattcttagaagttctgagttgccagctctgccaatccatagctaagaaatgccaaatgccaccaggaagaatataacaaatagagtcactgttagaaggaaacaaacaaggcttcctgatttgtcatatattgcctcttgtctggtggcctctctaggcttgtcgtcattgatttctatgaattaaacaccagtagctgagaaactgacagtgaaactgtcctttgtgggtcagtggtcagtgagcaaatgtctttaaaatgtcactgactaccttgccaattttcccattggttactgtgttggtgcctccccatagttgagcaccctccctagtgacatccaggaaatgaggtccttcacaagctgacctgaacaccagggtgccagaaggcacgccctagcctgtgagaagaaacccatcatttcaggttaggtcgaaacacgtgcatggaaaccagggcactttagactttcagatttcttaccttttgttggatattttcctagactctgtttttgttttttttttcttcctttaaagaaccagccaaatgggaagatctctttttttttattttatttttttgaggcagagtctcgctctgtcacccaggctggagtgcagtggcacgatcttggctcactgcaagttccgcctcccgggttcacaccattctcctgcctcagcctcctgagtagctgggactacaggcgcctgcccccgtgcccggctaattttttgtatttttagtagagacggggtttcaccgtggtcttgatctcctgacctcctgatccgcccgcctcggcctcccaaagtgttgggattacaggcgtgagccaccgtgcctggctgggaagatctctttaaaaagcatttttatgagtgaggaaatatccaagatggtacccaggaaaaggtccaattttggttgagtaatgcaaacaaggtagttctaagtaagaacaaattaatactttggtaatgttattaatattgattttttaaattcttttttttttttggagacagagtctcgctctgttgcccaggctggagtgcagtggtgcaatctcggctcactgcaacctccgcctcctgggttcaagcaattctcctgcctcagcctcctgagtagctgggactacaggcacatgccgccacgcccagctaattttttgtattttagtagatacggggtttcgctgttgttgcctaggctggtctcgaaatcctgagctcaggagttcaccttggcctcccaaagtactaagattacaggcatgaggcaccgtgcctggcctgattttttaaattcttgatgtgtactttaacatgaatttgaaaaatatatttgttttcatgacatatattgagaagccaccaccagacctggcctttccctgtggcggcatctcttggtcctccaccttcccactccagggcacctccattctcatatcctaggtctgcctgttctgtgatctttaccacaaaccagattttatctgcttagtcttcttctaaccattctatcacatatcatataccactctaccattctttcttccctcttacttcccaagccattgcttccctcttactaacaactgctggtttattacttcttcccatgttcccatccctgttcttagcccccaatacctcccctcgctgactctctacttctgttactcctttcaaatctgactcttggaatccttgtcacataggaagaagttcctttcttccccaaacttttactcacaatcttcttcaaggtaactaaaacccggcctttttctgtaggtgctctatcccctcaagaagggaattgcagtgtttttagctatctgcttcttgggggcacagttccgccaaagcctcccaacttctctttgcaatcctcttacactcctgtctccccagtcctaatggcatgacctggagattttcaggacccatgattttccagcaaagagtcactacagagtaagagtaaatgttactgacagaagtgttttgcaaatacgtggagacagagcagtttgagggtcttgattgactcagcagctgcatcactcagcttgcactctccctgtcccccagcctatacacaagcatttagtgacccccgtgagaattaatgttttcttctcccttctcatgacattgtacattagggacttcatcatccaaatgttccaccactgaaaagaaagctctacttagagacagaaataagagcaactagagcacacgtgcttgtttaacacttgcatctaggcttttggtgggcatgtttcctcccctccagctcccctcctttggtctgagacccacttccatgctaggattcacttctcttcccatccccacgatccttaagccccaacctacttccacacccccaacccaacattcagccccatctccagttaattaagatgagtgaagccctcgaagtgagttccttttctctttcagttcaaaaatttctctttatcttcaccttctccttccttccctccagtttctgagaaggatgcattctccctgcttacaaggcaaatctccctcaacccttgctcttgttcctaccctgcttctaggttctcacttcatccatcatccctttctgacttgcctcgtaagagtcaaatcatgcccttgtctctccattctggaaaagattctcattcccctttgtattcccctagtctttctccttcccttcatgcccagacttcttgaaagaatagtgtctctacatgtagcctccacttcttcttcacttgctcatttcttcatcccttcccatcataaaaataatagataacatttattgcacacttactgtgagccacgctctgtacagttgacccttgaacaacataggtttgaactacacaggtccacttatatacagattattttcagtaaaagttacagcaagtgtgcctgactctcctatctccctttccaccacctccagctcttccaactctgccacccatgagacaacaagactcacccctcttcttcccctttaccctcagcctattcaatgtgaagatgagaaagatgaaaacccttatgatgatccacttcctcttaatgaatagtaaatatattttctcattctcatgattttcttaataacatttcctttctctgcttactttattataagaatacagggtataatacatacaacataccaaatatgtgttaatcagctgtttgctattggtaaggtttccagtcaatactcggccattagtagttaagtcttaggggagtcaaaagttatacatggacttttgactgcacagggggtcagcacctttaacccccatgttgttcgagggtcagctatatttggtgctttaaaatacacaatttcattttaatctcagaataactttataaggggcactgttgtcatccctatttgacaggtaagaaaactgaggcccaagaagaggctttgaaccaggattatttgacttcagagtcctcctgacacttaagctgctatattagaggttgatggtgacctcctcatcattgcatccaggagcctcctctccattctcatttcatttgatgtctgcagcatttgaatcttgtggccactcactccgtgaaagcctccctgtcctcactgttggtaaaaagcacacttctgggtgcctctgcccatatcccctttgctggctcttcatctcccttctcccaaacctaggtgtttacaaagaattctatctagataagatatagatgaccctcagatgggctccagggccaaactgcagtttcttaatggactgactcttccaccaaccacctcacagataccctttcttcactgaacccatctaaccagcttctcttaccttccctttttctgttaatggaaccctcatcccgcagccccccagctgggtcctcagagtcaccctggaatcatcttcatccttctgtatccaagtcctgtggattctgtctccatggggcccctccaatctggcccatttccatcatgacctgcatctcattaattgaggctgcctttaacagtcacccagtaacctgccaatctgtctccctgtttcctgcccattcatgtatttatgataaattaatattcttattatcactgtttttcaaaatcttgctaagactggtgtaggatccttggctctcaagaccttttgaaagaaggctccaactctattctggccattgcatatattattctccaagatgtcactattagtgaaagagacctaccttttggccccaaaacatgcctcaaagtttttctccttagaacccttgctcttctcttgtcctgggtgcccagctgcctctgtcatctttcaaaggtaaatctagaagctgcttctttaacgaagaggcctgaagcactgtactgtgcttacagtagccccatagcattgtgtctgtacctatgtcagagcactttcctgagccactatctttccatgcacacaagttgtccaccataggtgcagcaatgatgtcatgcagagcacggtgttgtttcttaggaaccagacatctaagaatgggttccagccctacccctaccagctttgccactgaaggcaaaccatcaacctctggaacttagcgtctttacctataaaatggagaggctgaaataccacatccatggaattcaaactgtgcttcagagttcttagattcccttcctatgcatagtccagagatttctcggcccttcttgttcccacactcagctttaatcagagtatcttgctttcatcttttttctatattgggcttctgagatttaaaaagaccctaaaacactggaatggatgatgtccaagattcactccaactctgatattctttgagaaagccatatcttggtcatttctgaaactcttactatgtctaatatgactaatgttaatatggaagtataaaatgtgagtattgtctttcctgtactcccctccaaactcccaaagatatccccctggatatacttccacttcttccttattatgaattcaaaagtgtgtgtgtgtgtggtgtgtgtgtgtgtgtgtgtgtgtgtgtcatgcctacttctctaccctgctattcctttttctgaacatttgcattgccatgtggaatatctataaaagtataaaccagctctgtctgggagaaatgtaatgagagccacaaatgtatttttgaattttctagtagctgcattttaagaggtagaaagaaacaagtcgaattacttttaataatatattttttttaccacagtacatccaaaatgttatcatttcaacatgtaatgaatataaatatatggatgaatgagatatttttacattctttctttttactaactgttcaaactccaatgtgtattttacacttacagcacatctcagttcagacttttttcagcacatttcaagtgctcagtagccacatgtactgattggacaatgcaggtctaagtcatcaaataaaaggataaattaaagaagaaacagagacaacttgccatttattgggaagaggggagaaaataagtcagtgcccttctcattgaagtctcattcttctgtgtcccacattgtcttcttttctggttgtgtaggggctatagatgttggggcccttgcatgtaaaaccagccaagctgatattgatgcagctgcctggccttcttctcctgaattaatggtgcttgagctcaaacttgcaagtataaagtgtttatcgacactagtggatcatcctcaatatgtccttactttaaaaaatgcttgcacctggggagcctcattgtctctgtgatctttcactccacgtgacactttaagaaacaaaaattgctgtacgaaggatcaaagtaggagatttccatgcctgttagttttatttaattttaaaaaaatttaaacgaaaaagtaaaataacatagtctggttgtaaaaacacctaatgttaatacagaagtataaaatgtgaacattgtctttcctgtacttctccaaaactcccaaagatagtcccctcgatatacttccagatcttccttgttacaaatgagagagagagagagagagagagagaaagagagagagtttataaatgctaaaatacataggtacacatgtacatatgtaaatttttctcacagaaatgggcttacccgatactcttctgtacattgcttattcgctttattttatcataatatgtcagtacctagagatttaactcatttttaaacagattaataactgtcagttcatttatttcataatttaatttcttcttgatggacatttaggggttttttggtcaaaaaatacaaacaatatttactgcaaacagtgttgcagtaaaatctttgtgcttattttatggagcattcgtccaggtatttctgtacagtaaattccagaagtgaaattacagggtcaaatgacatgcaaattttttaaattgtgctagctaaaccaaattaccctgcaaaaagtttcaactaaactctgtttttagcttgaggtgggaggtaggattgagattctcaaagatgaagaaaggttgtcaagagtaaagcaagaaaagaactcttatgtaagccttgctaccttttctaccactacattaaaacaatatcaagtggaggttggccatggtgccttacatctgtaatcccagcactttggaaggccaaaacaggagaatcacttgagctcaggagttcgagaccagtctgggcaacatggtgagaccctgtctgtacgaaaaataaaatttaaaaaaatcatctgggcatagtgatgtgctcctgtactcccagctactcagaggctgaagcaggaggatcacttgagcctgggagatggagactgcagtgagctatgattacacgactgcattccaggctaggcaacagagtgagactgtgtcaaaaatattaagtggaaaacataagtgaatatggtaattttataaaacttttgttaagtttggtttgatgcataagagacatctttcaactgtaaaattcactgtgggtttcctttttatcagttgggtagtgatagggaaggaatcaacctcattttgtcagttaaaaaaaaattatctcagatcacatcccaagcagtttttcagaccagtttttttccagtgcacaggcagttcaaagattattctacagaatttcagaagtgcctaggcttgaagaataatgtatattgagttatgatattccttccaggcagaatttaggtgcttcatgtcatttttccttcttagtcaccagtgctcatgcatcattactttggatgccttctaggtctactccttggaataactctagaagcttttccatcagctgcttacaataggaaaataatcaaactagtagtttcaagtctacctggtcataaagtctcaggtctacctggtcacatctttcagccattgagtcagatgaaaatattcagcttgaggtccagaagccacccacttttgattataaaacacagagacagtcactattttatacattgaaagccaattctttttttttttaagagaaaaacatacacatttatttaatatgttttatgtgacatgggagccttcagaaatgaagacccaaagaaacagagacaactgtgcatttttatggacagtcatgcagaagtgtggccggaagaccaagggtatgatctaatggtaataaactgggggaaacctggcaaggcctgcttgttcaggtgcattctgtgtccccgggtcttcagagataagaatgctcctatcctccaggtgtagggtgggcacctctggaatgaaagttttatggccaactctaaaggaaaattgtgtcctggatggaaagtcagttcttaccagtctaatctttagtcagtggcaaacttaccatctcatttttctcatgagcaggaggtacttcatagccctacaaaataaaaagaaccacacctgcacaaaattattctagctggggcttggacctccaatctgagttgagtctggccttggtaactcctttaaagtgtggtgtaacatttacatttgttttattgtgtttatgcaaatttactagacaataataaatatagtaaataacttcaggtaaatgtagattgctgagattttattgtatgcctacataatttcccaccaaacacaaccaaggcgctaaattacaacaaatagtaagatgtgtcaaaagattctactaggtcttgtactaaaatgatagggggtagtgacaaaccaagtaactccatacgggcccttgctgtggagtggtctgtggctgtctgatacccttgctcttttgttttgcgctgagcatctacctcccatctggtgttcctatggtggctgaaggagctggtgtctgataagacccagcacttggtttaactgagaaacattgggtatattcttacagaaataaaagatattacctagcttcttttatcccctcccttcatcttctttctcttcttccctccctccacgctcctgttctcctccttctcttccttctctttccctctctccctttgtccttctctccctcccactttaaccataggaaatatagagcattccgcatggtctttcgcctttaaccttctctggaaatacatgatagaattgggtttgtgatttattgctccagttttgcttgccaaattaaatttacaggtattagaatgtactcatagataggattgtttaagagttgttggctgcttaggagcgtgtgtgtatgtgcaaatgcacatacatgcacttttataacaggaaaaagaaaggtgtgacagacagctgcagacatatggattgtacttacttgctaattgaaacattgcaagggacaattcaagatggcagatttctagtggagattagattttaccatgaactgaactggatactaccagctcttctcttatcactggcacagagtttgctggacattcccagtctaaaacttgggaggagatccaatactttgaaagttgggcaacaagagcgtgccaaatgtgtttgcactgtgttgcccaaccatttaattgtaataatttgacatgctaatatttcaatattcagaagtaatttggaagccaattgctttatctgttttgcttatcagagtcatattgaattctctaggcatcagcatgcaataaacttgttttcaaaggcactctgttaggtggcatacagccctgattaaaaacagcactgaacttagacatgtttcatttttttctctaacctagtaccttttttacagattgcatattaacagcttatttttgcatttacctctgtaaaccctcaatcaaaatttatttaaaatattgggagcttttagtttaaagtgatacctactggcccctcaaaacatccagcattaaaaaactaagactggcagtgaaataattatcaaaattataggaagaattttcatttagccagaactgaattgaaaaatccatttggtggccaggtgcaatggctcacacctataatcccagcactttgagagaccaaggtggacagatcacttgagtccaggagtttgagacaagcctaggcaacatagggagactctgtctctacaaaaaaaaaaaaaaaaatgatccaggcatggtggcacgtgcctgtagtcccaccttgggaggctgaggtaggagaatagcttgagcctgggagattgaggctgcagtgagccatgattgtgccattgcaacccagcctgggtgacaggcttttttctgtctcagaaaaatatacatatatatatccatttggtgacacaggtttgttatgtgcacctggaaataggtagatctttattcccctccctcaagtccccttgtttcagaaacacaaggttgacttcggttcagaaaatggccagctcttcccactacctttcctgttgagagctccatagtgctgttgtcttacctactccacagtattacatcttttgctctctcgggtaagacgcttcaaataccagaaaacacatacatgcaaaaaggaactaggggtctggaggtgagaagaatgggatatttagtaagtggggacagagacataagagtaatattagaagaaacatggtagatataaacatctaagctactcagagaccattaaatatttacagaataagttcaaagtaatgtctacattgcattgactacaaattgtctggttagattgctcctcttagaaaatgaaaaacaactatctaaaagaaaaaatgattgtaacttttgaaaaaatactactagatagggtaaagtaacacttcccaaaagactcaaaaaaccaaagaaaaaaattctgaaagtgattagctaaatcagaagaaaatttctaaaagtcagtagactgagaagaatgctagaagacatactctctaaaacagaaaaaaaaaaagccacaagaattgaacactctaaaatgtgaaaacagcaatctgagatggagagaccaatgataagtggaattgtaaggaaactgagtatatagcacagttaaaatctgataggaagcagtaaaacatagaattaatactgtaggaaatggaaccattgacataaaggatgatattggaagttctcacaaaatactgagaaaaaaggaaaaaagatttataaaatggtgagaaactgacaaacatgaaggataaagaatagaaatctggcctaagaaattgatgatcttgaggccgggtgcagtggcttacacctgtgatcccagcattttggaggtcaaggcagggggattgcttaagcccaggagtttgaaaccagcctggacaacacggtgagaccctgtctctaaatacgaaaagagaaaggaaattgatggtcttaaaatgcagtaataaaagccataattaaagaaacatgttcctaaactgaggaaaaacttgagtacacaaattaaaagatcctgtaatatttgggggaaaatcattaaaaagagacattagtacttgagatgctcagggctgtgaatacagaaaactcattctggatccactaaagaataaaaaacttgttgactcacataaacggtgattccagagataggtgagcatcagggttggcttaatccagaagctgcagctccatttctctaacattcccttttctatgtcttggcatcttcaaaggctgttttcattcattggcaaagcggttacagtagttccaggtttcacatctgccctgcaggatactcagataaagagtacgttcttctgtgtcaggatttcaaacaggagccctgagatgcattcttagggctgcttgtgatgtgggcctgcagtggaaccagtgactgagaccggaacaaaggaatttgcttatcagatagatggtagattgaagaacatcagtgttgtgctacaaggtgaaaggggagacaatccatggaattcactccaaagattgacgtggagcacatttggaaaaatgtttgaattgcagggagaaagaaaagaacctacaaggataaaatacgtttctattaaagctatacacaaaggaaagaaaatcaagctggcctcagacttctctcttgttgaaccaaagccagaggagaatagggaaaattctacaactttgttgggggctaagtctataacccaagaactttattttcagctaagttgtcttaatgtgtgaaggcaacacaaagtttagtgatgcaaggattcagtttctatttgtatatttgttaaatacccattgggcatttacctgagctgagaaggatatcaaaatccatacatcaagaacaggatgccatactatgaaaggactggtatgaaagggttgccctgtagtgatactgtcacagaaccaacatccagctcttcacagaagctctgagaactatgacttcagcagacctcacctgtttgtactggccgtgttaatgaccctataggaatgtggttgggttagtatatttttcacaacagcgtctggatgaggtttaaaagcaaataatttcattatgaattattagttcttattatgagactagccctgtaattggacctcagaaattcccccctgaaaagcttcaggcagagtgtaccatcagatttaaaagtctaattaagtatgactaaaattatgtttcattttaccctacctttgactagaaagaaatggtctctaaagacctaaaaaataaatatatgaaaggctattcaaagtgaaaaaccaaagatgaaatggaaagggagatgaatgagataagaaagaattataaagacgtaaaatggagtagctaaattacagtccccttaaggcagacagcaaataacaaaattgacactttaggagaattgagaaagtgatgcaaaggcaaatagggttaaactctcaggtgggtgatgtgttccttctgatatcatgtcttgcatttttcccaattttcttaacatgcatttctctacttgaagatgatctatattaatacaaaaagtgaaattaatcaaaatgttcagtatttgtggaactgcttaataaataacaatctatcaatacgttatgaaatgttgaaattcaaaagtatttgtgctgtagtgttcctccctataagtgagcgtgttgactctcattcatgttattggattacatttccaatattcagtgttataaatattactgcatcccttacccattgttaaaatattgatgtgcttccagacccattggtaaagagcccctccttggagtgccccagctccctggatgcccctgcccctctccaagatcccagggcctccctaagattccaccactagagagttaacagctgacaccagtgttcttccatgtcaaaaaaaaaaaaaaaagttttttagtattatttcaggttatagaaatgcattcctgggagtagacatttgctgttattcctgtattctctttaagccccctgaagtcactctgtttctggcagtggtttcttccagctaccacttgcacaaatgctggtctagagcaattcattatgctccttataatatcaaagaccttctactcctagtccctaactcacttctgatctttatcctgtttcttggaccttaaaggcttctggaaatgggtaaaatttagaatttaatgtcagtgaaattcttcttttggttttgttgttgttgttgtttgttgttttggggcagatttagcattatcattcacccctgttagccatcttggcacagaaatgttcacctgaagtggtacccagaatggtcccctaatatatctacaccctaaacactatgaatttgttacattacatagcagaagggattttgcggatgtaattaaggttatgaaccttaccatagggagattattctggattatctgagggggcccaacctaatcacatgagtcctttaaaaacagaactagcctcgcaccgtggcttacgcctgtaatcccaacactttgggaggccgtggcaggaggatcccctgaagtcaggagatcgagaccagcctggccaacatggtaaaaccccatctctactaaaaatacaaaaattggctgggtgtggtggcgcatgcctgtagtcccagctactcgggaggctgaggcaggagaatcacttgaacctgggaggcagaggttgcagtgagccgagattgcaccattgcactccagcctggcaacagagcgagactccgtctaaaaaaaaaaaaagagagagaattttctcaggctagaagcaaaagagatgtgagagagagactccaagtatgagaaggatcaaacatgctttgctggctctgagacgtagcagccacattaggaaccagagagagacctctaggaacaatgggcagcccccagctgtcaactggcaaggagacagggacctcagtcttacaaccacatcagactgaattcagccaacaatcacgtatgagattggaagcagatttagccccagaacttccagaatggaacacagctctgccgacaccttgatgtcagctttgtacaactctaacagagaaccagctgagccatgccatacttggacttttgacctacagagctgtgagatgatacatgagtgttgtttttttaagccactaaattggtggtaatttgttacaacagcaatagaaattaatatgccaacatgtaaaataacagcaacaacaaaaaaaaacaacaaaagatcgtggaataaacaataaacattgcagaaaacacagttctgaatgcctgttgtcgcgctctggctgagaatgtctacacagtaatgagcaccaaatctgaaggccaaaagcactcagtaggagctttattctctgcactccactcacaacatacaaaaaggattggggttttagggggaaacatgagtgtgtatgtatctgtgtatcatttttggtaagaaaaatattttagagatgaaccattttaacaaagtggccttgttgtagtgctgtaattaaaagagggtgggtgtattgtttgtagcttcttgtttgtttacttaaagtcagtattgcatatagtaacaaattggtgagaagaaaaaactatacaaaggggagattgttttggcaatggtacatgctgtcctatttgtattttacttcttctggtacaattgtaaagcttagacaagcttttcaagatgtgttagcacaaggtctggttgttatttatggttcctaagctctgaaggctacttacctaggctcaacccaactagaaggtaaagtgaattgctttgtggtatgaattacactggtaatgtggaagtttgctgacatatgctgtaattccaaaggtagttaagcacaggagttgatgttggagccagactgtctgggtttaaatcctagctcttccacttactagctgtatagccttggccaagtgacagaaccacccgtgcctcagtttccttttctgtgaacatggataataaaactacctctctcatggtttattgtgagaattttagaatataaagtgctcaaaatggcattgtagcacatcaattggaagcaataaatgttagctataactatgattgttatccttgccttaaacatgaaaatattcatgaaattggggcattcgggctccttggacacaagaaacaattaatcccaaggatccccccaggtgaagatggcccaaccacctgtatgagagaagcaaaccaggacatccagtcacctgttaggcccttctgtccccacttcactggtgtttttaacttcaaattagtgaggctttatagataatgttggcattatagcagtccttgccataaaaatcttcattttttaacaattgacaaacgcatttctcaatctgctgtttcatggaatagtgtttcatgagataataatgggcatgctgtgaaatgatcggtcaatactaaaaatttgggaaacacgagcttaaaggtttctgtgactcagggcttatcacagccctcattattaatgtaaattttgaatttccaaagatatatacatatagtgcatagctcctcaaatatatttgaccgtgagacttttttttttcaagatatgcctcttaaaatttcctggaagtgttcttcacatccagcttgggaaacaactgccctaaaataggagcatattttaccattattatttaacatttatgaattaagatgattatgaattgtagcttgttgtaaaggagatttttatacttacatatcccaaatgtatatgtttatgtatgtgtatccatagtaaaaactaaaactagataaagcagtgaagagtctatttctcactttgtagattaaaaatggtccttgttaggtcaaattaatgatttttcccagtagttcttctctgacacagataatgagatcatcttatagatggtcacttggcaaacactcggtcatccaatacgtattgaactgggcattctaggtttgtcatccatcactttagtgaggccttttataaaataatttgtagtttcagccagcaccatttattgagatggtaagttctataaggttagtatcctgtatgtgaagaaattcctttctattgacataaacttacctctctcaaacatcagggattcatcccttcacttgatattcaagactggtgaatacaaccaagtttacttttgttgattttatatacttcagccttatcctctacccctttggtctttgtctttctcaactaaaaagtccccattttttggtttgtcacttgactcatgtcaagacctgcgaaggatgtgagatttttcccctatttgcaggttaacaaattagtctaccacagtttcatgaatgctggcaaaagacacaagactcttgggttagagacaaagcctagtttattactcacagcaatagcagtagctacagtatcagcatttgcaccagattcccaattcccataggaaaataagaaggggggcagatgacacctgcaagcacgcacgaacacacttacacacacacatacccacacacacacacgggttgtgttacaaaaacgaatccccaacatgaatcttttataatggtcagttaagtcggccttacctttgccccagcagaagctattatcatgtttaagagcaaacaaacctgctcatgctatagagggagacactatcatcttccaaagcagtttacttgaaaatctaatccagcacaaatgcagttagtgtctctacttgcaagatgtgcagaaatacaaagggcccatgcagaattgtctcccaacagggaacagctgtcccctgcgtccactacaccactgttccttcctctgagacctttcaagtttcattatacacacatcaaggtctgtagccaaacctgcaatatttagatgaaaatatattggtgcatttatttcttactatagaacttaaactccacagggcaaggatctttgctttgtttacttggatatcccagaggcagagaactatatccagcacatagtcagcattcaataaagattcgttgaatgagtatatgaatttcctgtattcttatttggatccataagtttattggctttgctgtgcagaagcagcagttatatcggtcccttcaagaaactgcctgcagagattcctggagtcatctgcctggagcattgcccactcacctcctcaactcacctcctggctgctccacgtcattcttccaatctcatcttaaatgttatttccttaaagaaacctttcctgacccagagtaaaatcagtaccttcgggtattcactctcacaacaccttgacttttttccttcatagcacttagcacagtttgcacttatatttattttagtgttttctggcttaaaacctgtttgccctatcactcatgaaactataaaccagaccctctctattttactcaccactgtataactagtacctaacagagcatggcataaagtggctactaagtaaatgaataatgaataaatgaatgaacatactgcagcctgtaggtcagagcccatcactctgtgagtagctctggcataaaatgggccaaatgcatcgtttgctccttgcctttttcaaaacagttttcccatgtttctcttcagtcacttagtctcaagatttttcttcagtagagtttagtcatttttttattttatattcccagaaagcacttaattttaaattcagaggttttatgtcattttactaatcaaaacagtataaacatattaagtcaatactggtcctagcattattcctttggtagttctaatgtttacacttaatatatttaactcagttgcataataaggaaatgaaacttacagaagaatcccatgggattcttctctcaattaatgaatgagcaaatattctttgaaaacctaccaggtgctggccaggcgcagtggctcatgcctgtaatcctagcactttgggaggccaaggtgggcagattacctgaaattgggagtttaagaccagcctggccaacatggtgaaacgctatctctactaaaaacacaaaaatttgccagatgtgatggcaggcacctgtaatcccagctactcgggaggctgaggcaggagaatcgcttgaacctgggagggagaggttgcagtgagccgagatcgcgccactgcactctggcctgggtgacacagcaagactccatctcaaaaaaaaaaaagaaaaagaaaaagaaaaaagaaaacctaccaggtgcttacaatcattctgggcactgtggaagatagcaaaaacctgaagactgagcctgaaggaggttataacttacatgagcaaataaaaatgtgcatgatgtgttagcatgtaataattagcaaacagtatcagaccaggcatatgtaagtgctgagccacatggtacagatttttaaaactgttaagagcttagaaaagtcagatattaccctgaactagaataataggggcttcctgaagttagtcctgagctggattttgaagatgtttgattggatatttaacaagaacttcattaggcaagccacaaaaatagcagtgcattcattctcagaaaagcaagacctggctgtactggaaggtataagttgggaaatagtgtcgtgtatgcacaatcaccgttggattatatgaatcacacagtctttatgactccttttccattcaattcaataccatacagagataaagccacacctttggacaaatacagccggggtgtgagccgccaaaagatggagccttactaaggagtatccacgaagtaaataaactccgaaggaaagacttggaaggtcatccaacatactcataaattccagctattgccaaagatgaaagggaagtgagagccatgaggaacaataggaaggagtgcccctgccccctcttaactgcctgtttacaggaggggaggagcagcagtgctgcccagatggcagagccaaagttagaatgaagcttcttcctcaccctaagacctctttaggaaatcctgtttgtgacggtggcttcactgtgaagtcatcaggagccccctccccgggttgcaggagcacacttctggattgaaccatggtttctaatgctgcttggaaatcttattatcatgtgcactcagcaagatagaaactgcatatcaggtgaagcttgggtcagactttattttgcaagcatttacttatctttcttgtacgatggaaatgctggcaacacaatagcttaaaaacaagataagcctcatcttttttcctgtgtgggtatgttagggaatgatggttttgatggcctttaaaaagcaggaaagggcaaagccctgtgatgccatttctttggcatttcattacttcattaagagaattatcctaaaagcctgggagctgtaatacggcttaaaaactgatgagagctgagtgaaaacaccatagactccaaaccaaattaaccagaaggttcatcccaaagagacccgcttttatattcgcacctggggtgtgtacttttccttctgccactcaagagcttttgcgtgtgggggtgaacaatttgctttccatgccaaacccgatgaaatgggatttgtcttccctctcagacaggtggccaagctgtaacagagagggctctgcctggctgcttgcctctttggacatgcagcactgtcagtgcagcgccaggccccatatctgaccctgtggcctcacaatctggaggcccacattggcagcctggggtggtgacagcttcggtcagttgttgtggagttccactggcagacaaagaagagtaggcgagtgtgctgatccaggttccttctgtatgatagaagaaacctctaaggtcctggtaatgtgtgaaccagtggaatacctgctccaataattaaagtatgagctttccttcctctttttcagggtggaccaggccttgggaaaggaattttggccttcccagactgtacacattacttaatgtgtccttctacacttattacatgcatcaggagcagatttcacaagccttcttcctatgagactaggttagtcactagggttaattattcagtagttaaaggaaatattgtgatggagggaaaaatagatttccagaagccagggagtagagggcctcagaacatcaaattgctccatgaagagagtacacagccatttttatttcagtctttgaacatgagatagtaatcgtgatttgaattctctaaacctcaaaaatattcccttcttagctgtaaatagccacttgtcccaaccccatatatccatggggagcttctgttctcccagagaaaatgcagttaattatagcaaagaaagggaccctaggtctccccttcctgccttaagagtaatctccagtatctctactcatgagataataaaatgtatcattttcagaaatttgaagaaggtaggtcaggactcaccagtgctgtttcaaaagccttttggttgtgagtgccacatctgaccactgcacagatagcactgagaaagaaaattggacccagttctctgcttttgccttccattctccctgtaagggtccacgtgaacagcaagtttggcctggtttccttaggtccctctgggcccatttcttttctttcatcatctttcctaaagctgatatgacaattccatggggaagaaacaaatagtacacttggatgaactttgcgaaacacaaagacctttcctcttatccctgattctaaagggatttttctgtatttaataagtaaataaatgagaacagttttagactgaatagtaagtgtcccatttatatcatatttgtgatgttttgaacagggtgaaggaaaccattcgtgataaagcacatggattaaaaatcgtggttgacttgtttaacagaacccaagtcataaagctcccttgaagagtactcaaaaattctagctacaaccaaagatgaaaagaaagtgaatagacctcagcaggcctgcctcctctgtttcatcctttaggttaaatgtcacctccttaaagaggctttttctattattctccaccagcatatcttattttcttcataacacttaccacttatttaatgattttctttctccctaaactgtaagcctcacaagggcagggaccacgtcagtcttatttctgtgttccctacactcagcatagtgataagcacatcacagactccaaatgtgctgaatgagtgaatgagctgctgaagcgtgctataatggcaaacctgttccaagttcttcatggacttacagactcctctggatcacctctttcttttcttagaaccaactgaagaatactacttggtctcaacatcaggcttaccagtgttattcccattagttcatttgtattttttaaaacccgggatttggccgggcgtggtggctcaagcctgtaatcccaacactttgggaggccaaggcaagcagatcacttgagtccaggagttcgagaccatcctgggcaacatggccaaaccctgtctctacaaaaaattagtcaggtgtggtggtacatgcctatagtcccagctaccttggaggctgaagtgggaggatcacctgagctcaggaggtcaaggctgcattgagctgtgatcacacaactgtattccagctttggtgacagaggtagaccctgtctcaaaaaaaaaaaaaaaaattcttttttcagcctgagtctcaagtccactagcagttccgtagtcatagccaaacgatgcgatgtagtgaagtggtcatgagagccagctttggagcatctagttgtctctatcacttcttagctcaatgatgatgagttatcattaaccatccctcaacctcagtttcctcaattgtaaaatgaggatattaatatatatcccccacatagcattgatctgaggttaaacagtatgtataaagcacttcacttttgtctttttgcattgtacatgttcagtgaaacttagccactgaacttcctgttcataatgttaaattaccttggtgtatcacttttctagaacaggataaaggatggcttcttctcagaggtaacagaagacattagaagaattcagaatcaaaaaagtccaaggacctggagtactgggattctagacagaacctcaagcgtggggtacacagcatgaactgaggtcacagtgggctgggcggcatggccaaatgactcaatagtgaagtgatgactaatcattgtagtgctccttatatctctccccctatatcccaccacagtcaccacaaaggccagagctggtcctagagtctggcaaaaggctgagcatgaaagtgagtttaaggaaacccatctaataagattaaagaaactatgcagggctctggggtcaaggcgtggggtcagctgactcctccacaaggaggagttgggggctcctacttggtcttcccttgttttccatagttcctcacagaatccagagggcagtccccaaggctctcagagtcttactctgagccacaggaagaagtaccttacgccagctcacaggggaactccaaacagtcagcaggaagaaactcagtcactcagatgaaaatgatggtgtctcaccattcttctatgcagttttctaaggggcaagacagagacatttggctgtgagacattaattaatcgaacagaatgtactttaactgttacctttcttatctaaggctgtgtggccggctcactggttttagtcaagtaaagagcaatgacttatgcatttaatgatctcactagacataatttcctttcatattggtttgtaagacaggtgctatcctctcccatctcaggtggagctcagaaggcccatttgttctaatattcctgaaccatgtaggatcagcaatctggactgttttttaaaaatcttataaaaatctgtataatgtatgcatcttatgtaagattattttttaaatagtatgtattatgttctttcatttaacaaaaatatacatggttgttgtagagcttttaaaatacgagtaaagagtataagtctatagtatcttgttataccagaaagtaagaaaatgctcaaaaaatatgggaacataccagaaaggcacagaatttagcttgaaggagccactggacaaatataaaacaatttgggcatcaaaatacataattatagtaaaggattataacctcctgaataaaattaaaatccatgagtccatgctgatataaataaagtgggagaaaagagagctttgtcttacagtagactgacaatcaataataacagagtgaatgatggagttagaaaatcatcaatggatgatgctaaaactactgagtggaaatttcatcaagagatttacgtagtgtcaaaatggctctttacaagatacttactttaaaaataaaaataggaaaagaaagaggaaagaaaaataaaccataaaccagtgaccaagagatgaccattactaatggtttaatagttatctttcaactgtttttcctatgcattataacattttaattttcttgtaaaattagatcatgcttttttgtaatctgcttttcttatataaaaatatatctggatcttatttatttgtatttaaatattccctggtacatagtaggcatgtagtaaatattggttgagtgaatgaaatttgcaagactttaaggaaagctgtgatgcacattggtgtaagtaaagtttttttcattctcatgattattcctttaggactaactcccggaagtggaatagtgatacaaagcatattcaaaaccctgagccctttgatacgtggagccaaattgccctccagaaagatttttctactttattttccctccaggggtgtattaaatgaatgtcattcaatacatttttaaggaggaagattgggattaaatgtgtgtgaaatacccagagtagacccagaagtcgtcagtcagaaagtaatagtcatccaaattcttttccctgtatctgtaggttagattctgtcaggaccaaaagctgggattagtaagagttgtcaaagccttcagtcatagaaaatggagtttttgttgatacgggaagctccaagttgggatagactcttattttcattaagccagtcatataccgtataatgtgctataccatccttcttttgtatctattgaaaaatcctatcagctgcactggacctgaagtctactatgtcaaagtaaatgataaagagaaaaacctggttcctgtttatgataggctagcattgaacatcactgttatcaacacagaacctccatgagggcccccttccatttgcactttgatgctggctacttagcacacttaacaccagctgtttccagtgccgttgccaaaggtgggcagagcaaggtgcaggatacatatacgttccatgggcagctgagcggcgtgctctcttgtgctagccagtgcctgtggcaacccttccctcctgacttcagcctccccactagttgcagccaggtggtgtattatctcctgatctatatatacattaaacatattattaaggagaacccagaagaagatatttagagagatagatacccttggattcaaaagatgagcaatcagaaaaattataccataatttgaatttgcttatattttcctttttggctttcactggctagcatgttctcaagtgatgacagttgggctgattgagagccgttagtcaaatccagtaacagtattaatctgtggttggaaatgactgttaaagtaagtgccaggctattcagttgtggtttttattccagcttccaatggtgccaggcttccagcaggaggaatagaggctgtggtaaaggaaaccgttggcaaatgaaagaaaccagaaactgtcactacccataacaacgaaacaacaaaaaaatttacagaaaaggaaggggagacaaaggaaattgtttaaagtggttgaagcctgtacagtctgatgtgatcattaggcgtgagggtgccgcagcatggtggtgcctaagacactgactccaattttccagtgagaacaggaaggctttaagcaccaaagccatgctgtccagtaatactgctgagcaagaaagcttttcttgaaggaagagaatagcgtttaattgagactatttttgtcagtctcctaacatgctcctcagaccactaatatgcaaaagaacctaaggatctggtcaccaagttacgtcaaaagagtttaccccatagtcctttttactgccttttgcagaacaaacgtttaataatgtcgctattgttcattggttatcaagaaataactcattgtaactcagaagtgcttagcaaagaatctatctcatatgtactttctttatttcaagaactttaaggaggcaggttttctacgtgtgttcaccaaagcgccaagattttttttaatattttgagaaaatattttcagtaaatctgtattcattgaatgaaatattaagtggatccataaagaagcagatgatataagtcccaggataacatcaggagaatctgaacacagtgtagctgaagcatttcatcaccccccaacaagaaaattgctattttgccaactattctaccacattgcagtgtttctaagatctacatttttttcacatttatttctaaaaatcaaaatgtgaattgcagtcaactggtgacatcttagatctgatgagatatggtggttctcctggaaaagcaaaagttagtaattttcagcatatcattggcatccaatgtttaactctgggggggtcaaaagacatcttcaagcactagtgaagaagacatatttaatttgaggacatttttattataatttagtaggtaagtgatgttccttcaaggcattcaaggaacccactctggaatagactaaagagactctgagtcagttagtgttgcccacgagggtcacagccggtcaatggcagacctggactgaggttcctgcccagtctggagggtcaacacagggtgtgttgtcctgctacctgtcagagcaggcacaaagcaagactcagtgaggcagaccccgatttgctctgaagcatccttctatctgggcattggcagaactcccaaatgagtgggtaaaggtaccaaaaaagttcagcctcaaatgagtgggtcagtaagacatgagacagtgaaacgttgttcaattgtgggacatgggattggcttggcagagtcactctgctccatgctcagcctgcagcctcctccctggtatcaaggccttcctacttccaggttcatcttttgaaatacatcatttattttcaaaatatactgatgttaataaaaataatgccaaagatatactaaaagtttattttctatatcttttggaaaatttataaatttccatataaagaaaatgaaaatgtcttttaaattttttagcatgcaaaaccacagtaatccaaagtatacattagttatgagctaaaattataccatctgaaggtgcattttatgagcaatgcatacaatgtctattaacaaattataccaacatgttatttgtaatacgttaaatacttttactcataatgctttgtaagctttaaagggccctacttaattagatgggataaatgaacacagcacaaactttcatttttttttaatgcctttcagcaagtgatcaaattttgaaatttatctcagcgttctcttttttcctgcttccccaaaacatggtaatcaccttgtatgtataccattggccttgtcgttggctgttattgcatagtagatgttgagtttttaaatttgatatttgatcttgacttaacctaagtctcagtttctccctttgaaatgaggataatgatatttacttagcagagtgttattaggagtaaatgagacaacatatgtgaaacaaagcaaagcagcccctttcctgtaataagtgttcagtaaattgaatttattattattattagctgttgatgttgaagaaaagttatttactcaacactttttaggtcacactggtttttatctacttaatttcttaaaaataatgatcttaaggtgaaattctcttacatatttccttaaaattcattcaggatttttatctagccaaaagtgatcagaagttattttatagtttgaaagaatctgaatttcattttcaaggaaaatgtgtccctcagttacaatgccaagactacgagtgatgatcaagaagtctaactggtcagtaattaaactttatattggaagtagacatttatttgcttaatattccaaaatctgactaaattgttttctaaattcaaaaggagtttttgagtaaaacagtcagttgctatttaacccgtaggtctgtaaaacctggcagccctctgtggccacatagtcttaagtacagtatagaagaaatacctcccaaggcttttgttttatgtctacatattcatctctttctaaaaccgtaagtgtagcaacatgtggctgcatttttaacaacttttattgcactttcatattaaaaagcaatataccagcaaaatttttgaagttttcatttaggaaaatacaatcgggctgggcgcagtggttcacacacctaaatcccagcactttgggaggccgaggtgggcagatcacctgaggtcaggagttcgagaccagcctggctaacatggcaaaaccccatctccactaaaaatacaaaaattagtcagcatggtggcgcatgcctgtaatcccagctacttgggaggctgaggcaggagaatcgcttgaacccaggaggcagaagttgcagtgagccaagattgcgccactgcactccagcctgggcactccgtctcaggggaagaagaaaacatatttcataaatattttatcttttttaacatatatttttaccaaaatgtaattatttattcctgtacatgctgttttttatcaaatgctgtttcatttcttatgagtgacataaagcctttgccggtgatatttttctcttatagttataaaatcaaaaatatgacagagagttgtacctctctagagaatgtataatgcaaatggatcttatatataatcatatcccctcagccttctcattcttgtaagttcatttgcttcataaataaactaaatagtttgtactgaaaccagaagttgaccttaatatttgtgttggctgggcacagtggtgcacgcctgtaatcccagcactttgcgaggctaaggcagcagatcgcttgagctcaggagttcgaaaccagcctgagcaacatggcaaaaccctgtctctacaaaacaaaaaatacaaaaattagcctggtgtggtggcatgcccctgtggtcccagctactcaggaggctgaggtgggtgaatgattgacccagaaaatggaggcttcagcaagctgagatcacttcactgcaccccagcctgggcaacagaatgagatcttgtctcaaaaaataataataataacaaatttaaaaatatttcttataacttttttttaaatgtgctacggatagattgcatttaaatacttgataaaatagtattgtttagaaatcatgattagcaaaactgattacagctcctgctcttatcacgtccctgactatgtctaagttacagaatcttctcagccatagtcctcacctaaataaggaaacgcatttatccccttatttgtcattttcctaacttcatcatctataaagttttcttagtgatctttttaaatagcacagcacggtatcatgggtaaattaaatctagagatttgggccaaagataggaccaaaataacagcattgaattttccttgcatatttagtcataatgaaacaaggaaaagaaaccacaggacagagaaaaaggagaaggaaatacagtattaagcaaaaataaataactttggaacgagtaacagttcattctatttgttcttgattggtagccttacttttactgagcaggttaattttatttctcagcagttttaactgcttcattcacatggtttattattttgtgttattttcttccatgatatggagtacgacagaagctgtgatatctgttttttagcagatgagcagagattaagtggcctgcctgcactctgggatttatttgttaatcagttacagagccagcactaagagctggatcttctgtctcctggtctatactcctttccataacatgtggtaaagtgcttctcccttgttctgaagaaatccctacagggaacctaacactgccctgatctggaaacaacattgttacctgacaggccggtttgccagggtgaccattcttaagtgttttagggagctaggattaatctttttttcccaagaggaagtagcaataaactgtgcaccaaaaataacgctttagctgctaaattctgcttagtaggtggtttcccaaagatgatccaatgcaatgagtcatccctctgagcacttactgcacattatttctttttactaatcctcggtgcttttggttgcatgttttttaacctttagagccctcctgggaggttcagagtcttctcactatgaatataaaacagactctactacatccccccacatgtccctcttgtcctttacttcctatacttttcaaatctaagataatccatcacttaggagaacagtcaggatcatgtccaaagataaaagatcagcagtaagtttctccagagttagcagcagctccatctcattcccagtataaaaatcaaaaatgtagatggatgtaagtcaatgtgtagaacccatatcaagaaaactataaaacttgattgagatacataaaaatgactttcctagatatagagaatatttgattattagaaagatattaaatattccattttcctgaacaggaagattgaatagttgtaaggatataaaaggtttccaaattaattcataggtttatgcaactccagtcagaattccagtgggatttcctgaaatgcatttggaagagttaaactggtgaaaatagccaagaattttttgttaccaaaaaaaaaaagttatgaagagaaactcctgctaccaagcactaaaatacattatgcaactacagtaataaaaataatgtggtaccagcagaagtgacagacattaatggaacagaatagagaatgagacttgaaaccctaatttaggaagtgatgcaatttatcataaatcacaaatctgggaggacagaacggcatatgcaacaaatgagaatagggtaattggtcaatttcatgggggaaaaatggtaacctgattagattctcactattcctcaccacagagcaaatgacagatggcttaaagagttacatattaaaagtgaagccataaaagaataaagaaactataggaagtatctgtgaccctagaatggagatatattttcaaagcattaagaagtcacaaacaaaaatactaatatatttgattatataaaaattgaaaacttttgttcatcagaaaataaaaacactgccaagttaaaaagcatgtgataatcttggagaaaatgaatgaatatgacaaaggtgtaatatccttaatgaataaaagagctcttaaaattaattggaaagccactagcacaccccactgtagctacactacattcctatcacactgtgtacatatcacagtgctaaatcattttatactcataatacagttcagatgacacaagacagtattagaaattcagatcttattttccattcacatattctttgtccaaaggcagtttaaggaaactaacacattacattatgctataaatacttcagaacagtttgtccacattgacacttccatttcctaaaatgaaaccctcgctggcccacagagggaaaaaaaaaaaaaaaaggctagctttgttaaccagctttatttcaacaagcacatccacatggtaagaacttcctctgatgagtcatccacagttgtcaaacaccaactttcctttgtttggcccatgcagaaatcaggtctgtggaagcacagttcaagagtctgaatcatttaattgtgttttattcatatctgaatttgcatctgtcacaaacccaatgtgtccaccgtgaaaaattgcatccttcaaatattactgaacaaaaaaccctattcaaataggtctgttctgtctagattgtctgtgaaatttctgaggaatgttgtgggctctgtttcctgtaccaaattgttgagttatcacacatcattggattctacccaaagtgtgctggataggcatattatattcagacaggataccagttgtctttaccattcataaaggaaaaagaaaagattactcctgctccctgccataagatataaactaagaagtgaaaatgtgtgtacccatagtttttttaatgtgtccttgatttcttttcttcaccaagatttgagttttattcagtcatagctttgttatgcactttcttgtcaccctgtacttgttcaaaactaaggactatagtcaagactcagatcctgccctgggattggtgccatcttagcttgtttggaaaaaaaaaaaaaaaaaaaaaaagatctttagagataccatcatatccatttgtatataaaaagagaaaagaatggaagtgatgctgtgtaatttattttcatctatttactctattttccaaattttccacaatgcgtatatattttataatcaagataatctgttactttttaaattttttatttttaatttttgtggatacatagtagatatatatggggtacatgagatgttttgatataggtatgcaataatttgttatttttaacagtacccatgatgaatcattcaaaatataaattcagtaaataagctttttgaaaaagttaaacttgctgttgggccagtaaaattttattctgataaaataaatgctagcttttgttgattaatcaccacactaaactcacaatactagacactggtagacaacatcactgacattcaagggccagagcccttatttatatgttgagcacattataattttttaaggaaaaaatgagaaaatcagtctttcagtgtttggactatttttaaccaatgattgaatccaatttgagaatatttttagatcatttgtaatgctttatgactgatacttttggttccattttgagcaaagcttctttttttctttttaaagaagccacttcagccaacagacacttccatttcagaaaatgtctagtgattattttcccccaaaggcaacatgaaaaccttcagcctcagaaagatgtcattttgctgacatccggctgatgtcaatattagagtttttgcaagagaaaggtgtgtgagcatagaggtgatgataattatatactcaaagacacacccacaacagagcccataagactccctttggcaaaaaatgttgtattgaagacaaaaccagtggattcagaggttaaaagtaagaagtagttttgagagccacattttagttaccgtaatgtatgtagtatttgctgttgaaatgtctctattagacagacttacttttgtattttctaatttttattccttgtatcaatgttgctttgaagtcagcctatcatgagagaaaacttgactcacttagctagttcattttcagaggtgtgtgttactgattaatgtagcactctctcttgctccacctacacagcacttcagaatcattctcaacccagcttacagcctatcgctaccaaccagactggatgaaatctccttgtcatcctatatgtgtaggtagctccaccccagtgaccccctagttgtggttgcctccttagatccagcacttcctgcagactattaatttaaccatgtagacctaaccataggcaatgctctttccctgcaaaagaggcaaggtgcgtatagttttacgaagtcatttactgaaagagagaaataacatcttgaattgtggtatgaggaggggactccccccagtctagtcccttattacacagtagcagtgagttattaggaaaaaagagaataaaacctgtctgtctggaccactttcattctgattgttttgaggtatgctcatttgatttttttaaacagcctgccccactgaaataacaaagaacttaatttttttaaaaaattctgtcttctacagcctcttgctctgagtctcctggatagggtgaccaaccatcccagtttgcctgggacagagaggtttcccaggacacagcattttcagtactgacactgggacaatcttgggcaaactgggctcgttggttaccctattcctgggccctctcctacccaaatgaccaggtattgaagaacaacagtgctaaggttcctactcatgaacgaattccctggtaaagcttttccttctctcccaggaaggcacagtataaagcaagactgggagttgtgagacagaataagtttattatgtggtatggtgaggttctaatttggtcgagtgatatctctagttcagagttctgctgcagagtgaaggcaattgataagccctgagcccagttaataatcagagcctcactaattaatcagtggcactcattttgccaggtgtccctgatcgtctctaatcatctattctgtctccacaccacaccatcacccttgctccaaatgaccttccagcatgttgtcattaaagtttttcaatgctaagcccaatttaaactatagtgagtattaaagctagaatttccacaagggagcagaagggttatccaagctctgtggttatatgaagagacagaagacagtattccccggagtgttgagcctgcgatatctgactattaaagaagcccatagtgacaggagtgattccatgggggtaccatatccttgacttgcctccaattttttaataatactaatataaagtcttcacccttgtgaattatagcttccgaagtttgactcagatttattttcctggttctaaaactttctttcatttgcaaagtttttcagtacttgctagtcgcctaacttcatggttagagtgagaattaaaatgcaataatgcattaggaacccagcccttggaaagtgctaaatacatcatcatttctttcccagccttaagaatccccctgaacagtgtgattggagagcaagagataagggaggctttggaagggaaataaataaataaataaataaataaataatgtaatttggcaagaaaaaatatcaaaaagtatataaaatgaagagttggatcctagtcacagaaagacaaatcacatttattgctgctatagtagacaagaatgtgccagcccagctttttaattttaaaattatggaagatatattacattcattaatatgaagaaggacgtgttactgactgaatgtttgtgtccctcccaaaattcttacattgaagccctaacccccaatgtgatgctatttggagatggggcttttgggagattattaggattaaatgaggtcatgaggatggggctcccatgattggattagtgccattataagaagagacaccaaagagcataccctctctctagccacgtgagtgcatagcaagaaggcaggtacaagccaggaagagggatcttaccagaaccctacattgttgagttaccatgctagcaccctgatctcaggctttccaccctacagaaccacaagaaaattaatttctgttgtttaagccacccagtttgcagtactccattattgcagcctgagtagactaaggcagggagagatgacactgggagaataaaaatgaaattatttgaatatttcagagaagtaactatttcttggaaatgggagatacccattcaatttttgtcatagtgattagaaatgactttttcatctcaacgaccgcttagtcttattttagtcatatgtaaagttgactcagtaaatatattaatttatgagttttgtaatgtttcagaaatctgaagtagtttggtgagttctagtttaattttaatcctcaattttgagttgaaaaatggtagggtttgtccctctgctctccctctctttctttctctccatctctttctctagaggaagttactcatagtccagtaaatatgagccctctgtggataaataaattattcacatcggtaacaaggaaaaattaattcagctatttatttttaaggaaattaccagactcatagtccctcctatggacagggatgccagcacactctctaacttgtgttagagacacaagtctttcctctaagtggcacctcccttccctggcagaggttttttcctatcagtctgggtctctgtgacggaacttcgtctcagattcttctttctgccacggtctttccttgtcattacttgggctttaaattgtttttttccgtgctctttcccaccagcccttctccctttctggaccggttttacttcaagtgcgtctttcccctccccactctccttaatcctataccgttttgcctttgctacactttttctcaacacttctctttctttgtcttccagggagaccatccctagccttcatacctggctgaagcaagcactggagggcaaagttcctatcctgcttgcctcttgctgcttctgtgaaggttttcgcaaggttttggatataggagaataattgtcagccagccccagtttttaaatacacattatttgcaggcagatattgtctggtgccacaggcagattaaagcataaacagatacaacaatataaattggatttggagttggctcttggtgtgtatacatctaatcgtatatatgtacctctgcagatacacctgcttgcacttgaattacccagagatgaaccaaggaagtgaattttgagacaggaggagctgaagttgaagaaaagaagggacagaaagccttcttgcaggggggagcaataaccactcagcatgtattaattgagttccaattatagccaaactgggcagtaaattcagtactctgaatacagaatcaagtgagggttggccctgtcctcagagaacttccagtttgtgtgtagaaatcaacaggtaaacgaatataatagagttgccttagtattaaagtagggaatgaagaagtgaggtgaacagatcatatatgtgcagtgtatggcaagaggcaatgttgtcgggtttttttttcttctgattttaaaactaacactcataaaacgcagtatagaaaagtagaaaaatgcagaaagcaaatcattcatcatctcaccatccaaagtgaagtataagataatagtttcataccagtgcctttttttgcatgcatagacatttttggtttattatttaaccctaatctgataaatcaggtgtttggaaagattcagatcataacaatagattatcaaaacttgcggagcacatgtctccagacaagtacttgattgaatatatggtaaaatgtttgtcactatactttaataccgcatgcttaaagcctttcatatatgtagacctaacagttttcctagcagttttttttttaatttatttttgtgtgtatgtggatggtttccaaatatttagcagtttttttaccctcctcctgaatccgtaatgtttgcttggaaatataatttcttaaccaccttttttaacagctctatcaaaatataattgatataaccacacaattcaccaatataaatagtacaattcagtgtttttttcagtttagcatattcacagagttgtaccactaccaccacagtcgattttagaacatttttatctccccaaaaagaaacgccatacccattagcagtctgtcttactcagcttgggctgctaacaaaataccatgaactggattggcttataaacagcaaaaagttcttcctcacagttctggaggctgggaagtccaaggtcagagccagtatctggagagggttcatttcctcattcattgatgatcgtcatcttgctgtgtcttcatatggtgaaagggacaagggagccttccagggtctctcttataagggcactaatgccttttatgacataattacctcccaaaggccccagttcctaatgccatcaccttaggaattaggatttcaacacaggaaattttcaggggcacagaccttcagtctgtatacagtcagttccctcaaatcccctagtcccaggcaaccaccagtctactttctgttcgtataaatttacattgtctatataaatggaatcacattatgtgtggttgtttgtgactggcttcttttactgagcataatggtttcaagggtcctccaggtagtctcagtatatcattctttttatgactcagtgatattccattgtaagtccataccacattctgtttatccatttatcagttgatggacgttaggattgtttccactttttggctattatgaataatgctgctataaatattcatgtacaagtttttatgtggacctgtatgttaatgcttttgggtatatacataggtatgccaaactaccttttttgcatattattcattctccaatttcagtgaaatgttttatataattttattatacaaggaaaatatttaaaactaaatcagttaccttctaatctcctctccccaccacctccatctatctcattctgccagactttactaataatataatacaaacttaaaatcatgcttctcctctcaagtcatgttcacatttccatcaagttctgatcatcttcttctaaatgtctttgcatctctagccatttccttgtcccacctagttgaggcccttgtcatcttacttgtacactgacttcccagttgacctccttggcttggtttccatcccttcttattgactcagtaaacccctgccaaattagtctttctaaaacactttttctatattgctgttcattgaagtcagacaaatcagcttagccacttactcatctgtgtttccttagatgttactttacttcccatctgtaaaagtaagttaatcaaaccacttcctaacattctattaagatgaaacgattaccgcgacttctgtctcccactggtaaaatgaggtaaacttctattcggtgattctgcatttgtatatcttgtctccttgtctcctgctattaatgtataaatacatattatatgtatatcatatgacttacattatatgtatattacatacattataattatatactttgaaatgtaatttatattttttatatgtgtattttttagtatttcccagcaccaattacagccgcatgtacttactgggtaatcagtcaattagtgtgtactaagtagatcagttaattgattttctgcttcatccagttatttgaataggtggtaattgtaaggtgataagttaacaattttaacttaactgataacaactctagaatagaatgtggtaatgagtataaaataatagatattctccagtaatatttttttgaaagatcactttatgaacatggaaaattcttccactaatcaagaaaaatagctgtcaaagcatagctgcaggtcaaatacaggttacaaaggtgttctataggttaacccatgacttccttgtcttttgagtacaatgaaattattgtaactaaatgaaactttcatcccctgttatgcatgaatcatttcctttctataacagacataccagtatacacttctcatctgttaaaaaacatacccaacttctaaatgttgtttgccactgttactgagattacaaatgatatctatgcatttttgagttgtttttttaaaaaggcatataatctgaaacttagtccccttggtaatttgacctgagaaaatttatctcactgatagacttaaatacttggtgaggtttttggttttttttgttttgttttgttttgttttgtttttttttgcaaaactgcatacaggaagtgatattgccaattcagaattaattaatccttattgaaaaatgtggcattcatcctttagaaaattcttttcttgataaagttgtaagagctgtaacatgtaagcaatatttagtgaccccagaggaaagactgttagacttaaatgtgacttggacctcaccacatggtggcaaatggttccttcctttctacttcactgtgtgaaatactttacatgattatctgtataatattggccaggaataagagaggtgtgtgtgtgtgtgtgtgtgtgtgtgtgtgtgtgtgtgtttagttaccacttaattgtaactctgctataagctgggcattctagtagatgagatatattcataatctcacttagttgatcctatgaggtaagtatcattctttccattttacaaatgaagcaactaagtcaaagaaattaagagactttcctaagatcatataggaagaaacagctaaatagagattcactcccaggacagtccatcgccaaacagaccctttccccagtcaaaaaaaaatcttgaaaaatcagcatgttaactaaaaagaaataaaaggagaggggaatattatgcccttaattaagccatgtaacatctccagtactcagtttcctcatctgaaaatagggataattgtactactacatttctcctggaatttttgtgagaatcaaatgagattatgtttggggcacttggcactaggccagatacaacattcatgctcaataaattataattgttaagattccattttttgcctttttttggaagttttagaaaaaaacttggacttctcaccttgtcatcttttaagacctgtcaagatgtctttcagagcgcaacttcgtgattctttatgaatttggctgcattagtgatatgcaggtggcttatattagttttataggactgctgcaacaaaataccagactggattgcttaaccaacaaaagcttattttctcacagttctggaggctggaagtccaagatgaaggtgtcagcaggtttggtttcttctgagggctctcttttaggcttaccttctcatggttctcacatgtttatttctctgtgtgcatgtgcacccctgatgtctctttgtgtccaaatggcttcttcttacaaggaaaacagtcagatttgattagggcccaccctatcttattttaattacttgtttaaaggctctatctccaaatacagttaaattcggagatcttgggagttgggcttcaacatgaatttgggggaaaaaaattcagcccatcaccttgcaataagtaaattcttttccactgcatttggaaatcattattttcaggaatagtaacattcatagaaagtatggttgagaaacgttaaggtgtgttctaaccactgaaatgctatgactgcaggattctccatatatggccatatatagtgagttcatttattgtgcacagaaaatatttaagaggtcaagtttaaggctgtataatttgatatataatataaaaagagatatgatacctgataatagactacaactattttagtacattaatgttgaaaattacctgtttatggcatttgttgaggaaggaatcagggaacgtttacttgtgtaccataggtgtatgcaaaatgaaataaaatgtttagtaactgcatctgtcagagtaaagctctatggcagggatttatagggaaacctagagaagtctcctccctcaaggggctacttgatcttcttggagaaatgccagaaatgtcacaaaatgaccttttttaattgccagttaaatgctcaatgtagacaaggaaggctgtgtgtttgaagcagacacaattgcctctaaagcccagagttaagatttagaacttgtaatggttagctgccataatattgggaggaagaaaagtggtataattagaaaaatagacccagaggtggttcactgcagcattgaggacaaatgaaaggagagagacccatgaggaagtactctgatagcagagtagtatggaaaaagtgctctgagaaatatcaaagaatctcacctatttatggttcgagactaggatggtggtatgttccaccttatcacgaagttaagcagatctttgaaacctggaactgaatttgacggtagcactgttgtaagaatgactgcaaacagaatgcccgtgattgtaaaacatggaattcatctaccaccaggtattcatgagagatcctaacccatacatgaaatgcagggaaaaccttcacttaccaaaggaaaaatgtctcaattttttttacttcttcccaacccataaagaatattttgcttcctgtgaaacaatgataatggcaaatatgattgaaatgtaatctgagaacatttcttatttaaaatgtatctttattcttttaggcctctttttcgtggaagttcagatgttgatcaactaggaaaaatcttggagtaagtaataattataattttacaccagtgtccatagcattaaaacatttacagtgactttcctctgacatgcatatcatgtgtttatctcttgtctttcttacttcaagcagctgctgcagacagtgttactatttgtgtggtgagtggagacatggtagaagtgccgttttatgcagagccctaactgctctgctctggaagcttgtatgttgcttgtgtggatctttttgctgctcctctttcttcgtgtggctgagctccagttcttttagttcaaatacattttctgcttgtggtcatttcaaaagcacccaccatcagagatgggatgcctggtgaccaagtacccatccttgtccagtgagcttcctgtccccactgagtatccttggtcacccaggttggttctgcgttgttttgttttgttttcctgggcgaaggatggtatgctacacatctcatttttctttggagcaccaaaatagaaaatgagaaccctaagtctttggcaaaataactctgcaactttgagaaagtcatttaaaacacctcgtgaagggcttacacagtgcctggcacatagtaagcactttaaaaagttatctattactgttactattagagttcatcattaattatttaaccttttatttccttaacttcatctgagaaatgaaactctgacttaaattctctataagatcctttcttgtgctcaaattctttggtttcagttacatcgctccttgatgatttacatagtttcattcatgtctgcatgttcatgcatgtatgcattcatgtttctagaatgtaactggggcacttcttctgacaaagcatgcagtgtggcatccttttttggttttttgtgtttgaaaggcccatccaaattggagtggagtaggaaaaaagtgggagttctagaccaaaaatagccctgatctttggtctgtgacattttataggaatcccagtgatttttatgaaattcgaagtctgtaagactgaaaaaaaaaaaaaaaccacccctaaagaacagattttcatatcagcactgtctactcaagcgtgactgcttaaaacagttaataaaactggaacctgattttgttcttttagtgactagaagcagctagacttctgttaatgccagtgctactgctgagtcagaacatagtagctttaaggcctgaataacatttgctagttttttatgcctgggggcttcctgggtccagggcaggtgatgctactgctcctactactgaccactctgtacagtggataaattcaacacaaagccttcatgttacccctgcttctgaatggcaagttatttaatcactcgatgaactcccatctatttttccccatgactgttgaatatattttgtgtgcatgtgatcataaagaggaaactagggaaagcagacatactgatgaccttctgttaaaaggaaagagaatcttgactaaagtcagcttgccaggacttgaaagccatcaccttctttcccttatttatactacctgacagttgtgtctacctccagcactgatgtctgcaatcttgttaacattgttagtgcccccttagtacatgaggccagtgaaatggaccagaaggaacatttgaccggcatgtttgacctgcttccaaagaaaagccagttctgcttttggcaaagtcctgacaatcgtaggttgccaacagcaaagaagctgtagagttctatggtttgtgcctttagattttactttgtggtttctggcattgtgtcatcaaaattatgttctgtttcctctgaatgcattaccttgccagagaaaagggacaatgctgcaccctagcgtcactgctgaagtacttgaaaaaatatttctgtctcctccatcactgccatttatagattttgtgccctgttgggcttgccaatataaatgtcaacttttaaggcttatattcagcagtccaaatagtggaattaagtgcaagcatttttaatggacctatcagaatttcacaacacatatttgggccataaaagttcattctggacatgaaaccaaattttttttaaggaaagccatattcacatactcttttttatttttttctttggagacaaggtcttgccctgttgtccaggctggagtacagtggtgcgatcttggctcactgaagccttggccttccgagctcaagtaatcctcctatctaagcctcccaagtagctgggactacaggcacagggcaccacaaccagctaatttttatattttttatagagatggagtttcaccatgttgcccaggctggtcttgaactcctggggtcaagtggtccacttgcctcggccttccaaactgctgggattacagccaccccacctggtccatgttcacatactcttaaagggaaaaacatttctgtgtttaggaagatttaagccttcaagtaatagcaagtattaaaagtgaaacaatagttttagcctgtgacatcttagagcatttttaagaatgatgtcatagctaaatggaaataaaatattggaatagagagaacggaactcactctggactctgtgactgagcttgctatctgtgactttggcagttcattttattcctcattctcaatttccccatctataaaatgagactaataacacctgacttacatgtcttaggaaattattacaggaatcagaggaggtgatagacttaaagttttatatatatagttatgtgtttgtttaaaattttatataaaattatataaagttatttgtatatgtacacacatacaaacagagatgtgctgttcctctgaaggcttttggcattcagttgatcatatacttgcaagatgtaattagatgtagatacattcaaagccacaaataaaaaagattttaaatatttctaggagttattaatataatcaatttctagctgactggtgaatatacacaaaaatattgatacacatagacctgacaactaaaaaggaatgaaaggaaatttttaaagctctctaacaagcatttttcattccctcctctgccctgtcccattgtatccagacacttacacgtgcatttcttttcataattaatagtggtatttttggtttttttctttttacttctattgtaggctgtactattgaacaaatctatatattgctcattgtcatttctatttattgcttctagtaaatatgtccatgaatctgtctttgcctcaataatgtagctctctcagtatgcctgatagaggccgaattacagtgtcttccccagacacccaggcagagaagccatgatgacagggttatcttcccagctgaagtctatggcctgggctccgtgtaggtgagggaaggggaaatgaagtgctacagatcttgagacctgtaccacatcttcctgaaatctggaagtacattcataagaacacctcttcctgggccttagtcccaacaagtagaggccaagcagaagaccctaatgtgggccagcacaatttctaactgtagttaaaattatttgttccagtatttgaatagctatgtaccccgtccactaaactatgattttatttttggttcagagttatacagtctgtgtgagaaagaagtccctgcatcctctgattttctctgttcaaacctacttacgacctatatgtaaactataaataatatctatacaatgtataagttatgtaagtccattgacccattaattttttaaagaatcttaagttatacatagatacaagcagttcatattttaagtgtggtagtgatgtatttcctatgcatcttgtattaataacattttctaattataataatagtaggcagtgtattgattgataattgactgtgtgtgatgtatatcaggtgctgtgctttgtactttaaattataaatttatatattactataaattcaaataaagtataactgatcctcattacaactgtaagttattatcattgtatacataaagacactaagggtcatagatgttaagtaatttgtccttacctgccagtaagtggcaggtgcaggatttgaacccaaatctgcctatttccgaagcctgtgcttatcacttgctgttctttccacatttctgatcccagaatggttttcaggggaaatataaataatagtcttttaatttactgtttgctcactttggaataccacagacttccttttataaaatcatgtttgtataatgcaggactagcacgttttagcctcatttttccttctgattctaatgtatatatttaatatgtagggaattgctctttaaccaaaaatgcaaccaaattgatatgttaataaaccatgttggatgagcatcataaaatcatgtcaatactggggtgttcgatcaaaacacaaaaagcattcttggacataaaggaagatatgtaccagtatgggtctcctctgaatacaataagtcctgctttgtcactaagtcagagcttactgcctggtaatatattttctatttctacatcatcccttacatttagtgtctgctaccagagcaatctcttatctcctcccactgaattttacaattcttctgtgagattaccctctcccccatggccaccatattgcagtaggacagagataaacagagaccctgccagtgataaagtgaaggtctcctgggactctgccccccatgtctcccccttagattttgcctttctctggaaattgatgagaaaacagcttctgcatagtagctaatgcttatgtccatgtgtggttcttttgtagcgtgattggactcccaggagaagaagactggcctagagatgttgcccttcccaggcaggcttttcattcaaaatctgcccaaccaattgagaagtttgtaacagatatcgatgaactaggcaaagacctacttctggtaagtttttctgatgtcaagctcgtctgcactgtgccagtgagacacctgctctacccagactgggtggtgggcacaaatatcagttcagtagctgctataggcatcacatgccacagccacatggagcaggaggcaacagtccctccagaggtttcattttcacacttgtagcagctggtggcttttgattctggaatgtctttctgatccacatttttttaaatctgccatctttgaatgtttatttcaatgcaggtttagaagcctctcgattcactttgacatatgtttctttagaagtaaatattatgtttcctttcttacagtttcatgctactttaagtaatttgtttgtcattttaacgtgccttttcttaaacattcacaactttggggagatgtttttccaaaagaactatatagcaatacttcttctagttgctgatttatttaataagtatttagtgtgccagggacatataaaatacctcactgaaaataaggacttctgtgctctgagactcttaatgctcaaccatatacataatttcctatacttggaggccagaacaataggtagaaaagtgtacctgttgggctgttcttgatgtctgaaacccagtgagtaatgagtgtctgctttacctcctgaattaacagcctttgatatctgcttctgcccgtgggtgaagcacaggtcttctccatgtgtctcatgctggggcccatgccagagaggcagcagctccctggggcatgtttttctcatgatagaaggtatcgatgctccagaagggcaagcagaaatatgcaatgcccctgaaggtccatacttggaagaagtacccgccactctgcccatgttccattggccaaagcaagttccatgcctaaggccaacttgaatggaggaaagaatgctccccctatggtgagaggggagagaaaagagggaatatgtactaaaagttatccaatctaccatagtatccaactcttgactaagttgtgattccaaaagctcattttataagtaaactatttggcaattaaactaaattttcttgcagaaacaatattattaacacaaagttttttaattaaccctcaacctggcaaccttgttcctgaagtagagcaataatagaacttaaacaccttttttttaaccatatttctataggacaaaatgtattaagacttccaacgtgagattctcccacacccccacatttggctaaggtgttctccttctctccaccctcttcccagctttaagccatcagtgtagctgtgaggaaagggcttcctctcacataatcctctagagacatgtctctgtattgtgaatgtattcccacagctcttttctcttctttcctatgtcctggagattaaatgccactacctaattttctccttcttgggctctgggaaaagagaactcaggctcaggaattttgcccctgctttccggtcctttgggaattcagcccttgcaaagcttttctagagatgtttcttgctgttagagacagttggaacctttctacagacaagctctttcttccacttgccctttagctcttgatgttcagaagatcctatagggaggctagcaaccatggactgatggggatctcaggataaatcagatttcagaggacccaagaatttgcctgaaattacacatagaactttctgtttgtatttgtttttctaggtcagtagccttcgatagaatattagagaggtccctaatccagttggaacctgactaggactgtgagcaggagtcctattaatatcatggttatgcagacctcttaagtggaagaggtcttccattaaccatgataatgtgaagtctgtaaattacatagaagactggaatgcatagacatttcatatacccagttcactttaggatggagaagccagtgtggcttccctgctacttgtgagctcctgtggcaatgaggaggtcttactcatcactaattagtgcttgccacctgctaggcacccagcaggaggcgttgatggaaggagaggaggaggatttgagtaacaagattacctgaggtaggggtggaaatgagactgaaattagggacacattctaactaatttaggtatggacagtttgggaatagagattgctgctactgcaaaggtttccctttccctcctttcaccttctacctcagtagctcagccaaactgcccaaaccacttgactaggaccaggagcttcttaagcgcaggcaccagctcattcaccttggtagccctacacttgagctgtcagcctggaatagagtttagtgactcgaactgaatctaatggtcccctgagagagctactgctagccatgtggcaccttggtattaattaaaaggaagatagccctgcctctgagtggtgtagccttgaggcaggataataagttacggtgaagtctccgactgtagcactaagtttgctagcactggaagaattactaaataaagttatatgcatactttaatggcttagtgagaaatcctgggcaggaaacagtccataggcacccaaaagggtcttctcctgagggacattttatacattagggatatatatgagtactgtctccatattatttagtgtccctttaaataaatactcattcccactgtagatgcgcttaacatatgacagtgaataaagggataactctgtaagtacattatttacattgatgtattgtatatcaaccaattatttttttctttattacagaagtgtttgacatttaacccagccaaaagaatatctgcctacagtgccctgtctcacccatacttccaggacctggaaaggtgcaaagaaaacctggattcccacctgccgcccagccagaacacctcggagctgaatacagcctgaggcctcagcagccgccttaagctgatcctgcggagaacacccttggtggcttatgggtccccctcagcaagccctacagagctgtggaggattgctatctggaggccttccagctgctgtcttctggacaggctctgcttctccaaggaaaccgcctagtttactgttttgaaatcaatgcaagagtgattgcagctttatgttcatttgtttgtttgtttgtctgtttgtttcaagaacctggaaaaattccagaagaagagaagctgctgaccaattgtgctgccatttgatttttctaaccttgaatgctgccagtgtggagtgggtaatccaggcacagctgagttatgatgtaatctctctgcagctgccgggcctgatttggtacttttgagtgtgtgtgtgcatgtgtgtgtgtgtgtgtgtgtgtgtgtgtgtgtatgtgagagattctgtgatcttttaaagtgttactttttgtaaacgacaagaataattcaattttaaagactcaaggtggtcagtaaataacaggcatttgttcactgaaggtgattcaccaaaatagtcttctcaaattagaaagttaaccccatgtcctcagcatttcttttctggccaaaagcagtaaatttgctagcagtaaaagatgaagttttatacacacagcaaaaaggagaaaaaattctagtatattttaagagatgtgcatgcattctatttagtcttcagaatgctgaatttacttgttgtaagtctattttaaccttctgtatgacatcatgctttatcatttcttttggaaaatagcctgtaagctttttattacttgctataggtttagggagtgtacctcagatagattttaaaaaaaagaatagaaagcctttatttcctggtttgaaattcctttcttccctttttttgttgttgttattgttgtttgttgttgttattttgtttttgtttttaggaatttgtcagaaactctttcctgttttggtttggagagtagttctctctaactagagacaggagtggccttgaaattttcctcatctattacactgtactttctgccacacactgccttgttggcaaagtatccatcttgtctatctcccggcacttctgaaatatattgctaccattgtataactaataacagattgcttaagctgttcccatgcaccacctgtttgcttgctttcaatgaacctttcataaattcgcagtctcagcttatggtttatggcctcgattctgcaaacctaacagggtcacatatgttctctaatgcagtccttctacctggtgtttacttttgttacctaaataatgagtaggatcttgttttgttttatcaccagcacacagattgctataaactgttactttgtgaattacatttttatagaagatattttcagtgtctttacctgagggtatgtctttagctatgttttagggccatacatttactctatcaaatgatcttttctccatcccccaggctgtgcttatttctagtgccttgtgctcactcctgctctctacagagccagcctggcctgggcattgtaaacagcttttcctttttctcttactgttttctctacagtcctttatatttcataccatctctgccttataagtggtttagtgctcagttggctctagtaaccagaggacacagaaagtatcttttggaaagtttagccacctgtgctttctgactcagagtgcatgcaacagttagatcatgcaacagttagattatgtttagggttaggattttcaaagaatggaggttgctgcactcagaaaataattcagatcatgtttatgcattattaagttgtactgaattctttgcagcttaatgtgatatatgactatcttgaacaagagaaaaaactaggagatgtttctcctgaagagcttttggggttgggaactattcttttttaattgctgtactacttaacattgttctaattcagtagcttgaggaacaggaacattgttttctagagcaagataataaaggagatgggccatacaaatgttttctactttcgttgtgacaacattgattaggtgttgtcagtactataaatgcttgagatataatgaatccacagcattcaaggtcaggtctactcaaagtctcacatggaaaagtgagttctgcctttcctttgatcgagggtcaaaatacaaagacatttttgctagggcctacaaattgaatttaaaaactcactgcactgattcatctgagctttttggttagtattcatggctagagtgaacatagctttagtttttgctgttgtaaaagtgttttcataagttcactcaagaaaaatgcagctgttctgaactggaatttttcagcattctttagaattttaaatgagtagagagctcaacttttattcctagcatctgcttttgactcatttctaggcagtgcttatgaagaaaaattaaagcacaaacattctggcattcaatcgttggcagattatcttctgatgacacagaatgaaagggcatctcagcctctctgaactttgtaaaaatctgtccccagttcttccatcggtgtagttgttgcatttgagtgaatactctcttgatttatgtattttatgtccagattcgccatttctgaaatccagatccaacacaagcagtcttgccgttagggcattttgaagcagatagtagagtaagaacttagtgactacagcttattcttctgtaacatatggtttcaaacatctttgccaaaagctaagcagtggtgaactgaaaagggcatattgccccaaggttacactgaagcagctcatagcaagttaaaatattgtgacagatttgaaatcatgtttgaatttcatagtaggaccagtacaagaatgtccctgctagtttctgtttgatgtttggttctggcggctcaggcattttgggaactgttgcacagggtggagtcaaaacaacctacatataaaaagagaaaaagagaaacttgtccatttagctttcataagaaatcccatggcaaagggtaataaaaaggacctaatcttaaaaatacaatttctaagcacttgtaagaacccagtgggttggagcctcccactttgtccctcctttgaagtggatgggaactcaaggtgcaaagaacctgttttggaagaaagcttggggccatttcagccccctgtattctcatgattttctctcaggaagcacacactgtgaatggcagacttttcatttagccccaggtgacttactaaaaatagttgaaaattattcacctaagaatagaatctcagcattgtgttaaataaaaatgaaagctttagaaggcatgagatgttcctatcttaaataaagcatgtttcttttctatagagaaatgtatagtttgactctccagaatgtactatccatcttgatgagaaaactcttaaatagtaccaaacattttgaactttaaattatgtatttaaagtgagtgtttaagaaactgtagctgcttcttttacaagtggtgcctattaaagtcagtaatggccattattgttccattgtggaaattaaattatgtaagcttcctaatatcataaacatattaaaattcttctaaaatattgcttttcttttaagtgacaatttgactattcttatgataagcacatgagagtgtcttacattttccaaaagcaggctttaattgcatagttgagtctaggaaaaaataatgttaaaagtgaatatgccaccataattacttaattatgttagtatagaaactacagaatatttaccctggaaagaaaatattggaatgttattataaactcttagatatttatataattcaaaagaatgcatgtttcacattgtgacagataaagatgtatgatttctaaggctttaaaaattattcataaaacagtgggcaatagataaaggaaattctggagaaaatgaaggtatttaaagggtagtttcaaagctatatatattttgaaggatatattctttatgaacaaatatattgtaaaaatttatactaaggtcatctggtaactgtgggattaatatggtcgaaaacaaatgttatggagaagctgtcccaagcaaactaaattacctgtacttttttcccatttcaagggaagaggcaaccacatgaagcaatacttcttacacatgcctaagaacgttcattgaaaaaataaatttttaaaaggcatgtgtttcctatgccaccaatacttttgaaaaattgtgaaccttacccaaaaccatttatcatgtccattaagtatatttgggtatataattaggaagatatttacatgttccatctccacagtggaaaaacttattgaggctaccaaagtgtgccaagaaatgtaagtccttagagtaattagaaatgctgttttcctcaaaagcatgagaaactagcattttcatttcttatttactccctttctatatcaatgcaattcacaacccaattttaatacatccctatatctcaagcatttctatcttgtactttttcagaaaataaaccaaaaataatcctttggtctctctatcttctgacctttgtaagcaacagaaatgtaaaaacagaaggggtccaatttttacacgtttttttctcaagtagcctttctggggatttttattttcttaatgaagtgccaatcagcttttcaaaatgttttctatttctcagcatttccaggaagtgataacgtttagctaaatgagtagaagtggacttccttcaacatattgttaccttgtctagccttaggaagaaaacaagagccacctgaaaataaatacaggctcttttcgagcatctgctgaaatactgttacagcaatttgaagttgatgtggtaggaaaggaaggtgacttttcttgcaaaagtctttctaaacattcacactgtcctaagagatgagctttcttgttttattccggtatattccacaaggtggcacttttagagaaaaacaaatctgatgaagactaaagaggtacttctaaaagagatttcattctaactttatttttctgcgcatatttaactctttcctagcacttgttttttgggatgattaatagtctctataatgttctgtaacttcaatattttacttgttacctaggttctgaacaattgtctgcaaataaattgttcttaaggatggataatacacccattttgatcatttaagtaaagaaagcctagtcattcattcagtcaagaaaaaatttttgaagtacccagttaccttacttttctagattaaaacaggcttagttactaaaaaggcagtcctcatctgtgaacaggatagtttcgttagaagtataaaactcctttagtggccccagttaaaacacacataccctctctgctgctttcaaattccctagcatggtggcctttcaacattgattaaattttaaaatcctaatttaaagatcaggtgagcaaaatgagtagcacatcagtaattcagtagacaaaacttttgtctgaaaaattgctgtattgaaacagagccctaaaataccaaaagaccaggtaattttaacatttgtggaatcacaaatgtaaattcataagaagctctaattaaaaaaaaaaagtctgaagtatatgagcataacaacttaggagtgtgtctacatacttaacttttgaagttttttggcaactttatatactttttttaaatttacaagtctacttaaagacttcttataccccaaatgattaagttaattttagaggtcacctttctcacagcagtgtcacttgaaatttagtagggaaggatattgcagtatttttcagtttccttagcacagcaccacagaaagcagcttattccttttgagtggcagacactcgacggtgcctgcccaactttcctcctgagtggcaagcagatgagtctcagtaattcatactgaaccaaaatgccacatacactaggggcagtcagaaactggctgagaaatcccccgcctcattcgcccctctgctcccaggaactagagtccagttaaagcccctatgcgaaaggccgaattccaccccagggtttgttataacagtggccagtctgaaccccatttgctcgtgctcaaaacttgattcccacttgaaagccttccgggcgcgctgcctcgttgccccgcccctttggcaggagagaggcagtgggcgaggccgggctggggccccgcctcccactcacctgccggtgcctgaaattatgtgcggccccgcgggctgctttccgaggtcagagtgccctgctgctgtctcagaggcatctgttctgcaaatcttaggaagaaaaatgtccctagtagcaaacgggtgtcttctgtgcataaataagtacaacacaattctccgaaagttcgggtaaaaagagatgcggtagcagctgccctgtgtgaagctgtctaccccgcatctctcaggcgctaagctcagtttttgtttttgtttttgtttttttaaagaaaagatgtataattgcaggaatttttttttatttttttattttccatcattctatatatgtgatggtgaaagatatgcctggaaaagttttgttttgaaaagtttattttctgcttcgtcttcagttggcaaaagctctcaattctttagcttccagtttcttttctctctttttctttgttaggtaattaaaggtatgtaaacaaattatctcatgtagcaggggattttcatgttgagaggaatcttccgtgtgagttgtttggtcacacaaataaccctttctcaattttaggagtttggattgtcaaatgtaggtttttctcaaagggggcatataactacatattgactgccaagaactatgactgtagcactaatcagcacacatagagccacacaattatttaatttctaactctctgtggtccctagaaaaattccgttgatgtgcttaggttaaagttctgaagatacccgttgtacccttacttgaaagtttctaatcttaagttttatgaaatgcaataatatgtatcagctagcaatatttctgtgatcaccaacaactctcagtttgatcttaaagtctgaataataaaacaaatcccagcagtaatacatttcttaaacctcacagtgcatgatatatcttttcattctgatcctgtgtttgcaaaaatatacacatgtatatcatagttcctcactttttattcatttgttttcctattacctgtagtaaatatattagttagtacatggaatttatagcatcagctacccccaggaacagcacctgacaggcgggggattttttttcaagttgttctacatttgcataaattatttctattattattcatgtatgttatttatttctgaatcacactagtcctgtgaaagtacaactgaaggcagaaagtgttaggattttgcatctaatgttcattatcatggtattgatggacctaagaaaataaaaattagactaagcccccaaataagctgcatgcatttgtaacatgattagtagatttgaatatatagatgtagtattttgggtatctaggtgttttatcattatgtaaaggaattaaagtaaaggactttgtagttgtttttattaaatatgcatatagtagagtgcaaaaatatagcaaaaataaaaactaaaggtagaaaagcattttagatatgccttaatttagaaactgtgccaggtggccctcggaatagatgccaggcagagaccagtgcctgggtggtgcctcctcttgtctgccctcatgaagaagcttccctcacgtgatgtagtgccctcgtaggtgtcatgtggagtagtgggaacaggcagtactgttgagaggagagcagtgtgagagtttttctgtagaagcagaactgtcagcttgtgccttgaggcttccagaacgtgtcagatggagaagtccaagtttccatgcttcaggcaacttagctgtgtacagaagcaatccagtgtggtaataaaaagcaaggattgcctgtataatttattataaaataaaagggattttaacaaccaacaattcccaacacctcaaaagcttgttgcattttttggtatttgaggtttttatctgaaggttaaagggcaagtgtttggtatagaagagcagtatgtgttaagaaaagaaaaatattggttcacgtagagtgcaaattagaactagaaagttttatacgattatcattttgagatgtgttaaagtaggttttcactgtaaaatgtattagtgtttctgcattgccatagggcctggttaaaactttctcttaggtttcaggaagactgtcacatacagtaagcttttttccttctgacttataatagaaaatgttttgaaagtaaaaaaaaaaaatctaatttggaaatttgacttgttagtttctgtgtttgaaatcatggttctagaaatgtagaaattgtgtatatcagatactcatctaggctgtgtgaaccagcccaagatgaccaacatccccacacctctacatctctgtcccctgtatctcttcctttctaccactaaagtgttccctgctaccatcctggcttgtccacatggtgctctccatcttcctccacatcatggaccacaggtgtgcctgtctaggcctggccaccactcccaacttgacctagccacattcatctagagatggttcctgatgctgggcacagactgtgctcatggcacccattagaaatgcctctagcatctttgtatgcatcttgatttttaaaccaagtcattgtacagagcattcagttttggctgtggtaccaagagaaaaactaatcaagaatataaaccacattccaggctgctgttttctctccatctacaggccacacttttactgtatttcttcatacttgaaattcattctgctattttcatatcagggtacagacttataagggtgcatgttccttaaaggtgcataattattcttattccgtttgcttatattgctacagaatgctctgttttggtgctttgagttctgcagacccaagaagcagtgtggaaattcactgcctgggacacagtcttataagaatgttggcaggtgactttgtatcagatgttgcttctcttttctctgtacacagattgagagttaccacagtggcctgtcgggtccaccctgtgggtgcagcacagctctctgaaagcaagaaccttcctacctattctaacgtttttgccctctaagaaaaatggcctcaggtatggtatagacatagcaagaggggaagggctgtctcactctagcaaccatccctccattacacacagaaagccctcttgaagcaaaagaagaagaaagaaagaaagcttatctctaaggctactgtcttcagaatgctctgagctgaatgctcttgctcctttcccaagaggcagatgaaaatatagccagtttatctatacccttcctatctgaggaggagaatagaaaagtagggtaaatatgtaacgtaaaatatgtcattcaaggaccaccaaaactttaagtaccctatcattaaaaatctggttttaaaagtagctcaagtaagggatgctttgtgacccagggtttctgaagtcagatagccattcttacctgccccttactctgacttattgggaaagggagaactgcagtggtgtttctgttgcagtggcaaaggtaacatgtcagaaaattcagagggttgcataccaataatcctttggaaactggatgtcttactgggtgctagaatgaaaatgtaggtatttattgtcagatgatgaagttcattgtttttttcaaaattggtgttgaaatatcactgtccaatgtgttcacttatgtgaaagctaaattgaatgaggcaaaaagagcaaatagtttgtatatttgtaataccttttgtatttcttacaataaaaatattggtagcaaataaaaataataaaaacaataactttaaactgctttctggagatgaattactctcctggctattttcttttttactttaatgtaaaatgagtataactgtagtgagtaaaattcattaaattccaagttttagcagaa

SEQ ID NO: 555 - DNA, 4772 bp, Homo sapiens
acagctgcctcttgcctcctcttcgcctccacggtggaagggctggggccacggggcagagaagaaaggttatctctgcttgttggacaaacagaggggagattataaaacatacccggcagtggacaccatgcattctgcaagccaccctggggtgcagctgagctagacatgggacggcgagacgcccagctcctggcagcgctcctcgtcctggggctatgtgccctggcggggagtgagaaaccctgtaagtgaaggagagggtctttttatgtgctttctttatttctcttaaagaaaaaaaaaaagcacaaccataaattaacttgagagggggaatggctataaaggcatctggcaatgtgtgttgttcacatgggatttgccactgctcaggagggtggctccaagaagggcctccctcctagggaaaggctgagtgacggcaggtgtcagcgggccccgtgtcgggccaggagggcattcccaccaagggtccttggagtcccagagcactcacctctcgcctggatcttggccttgggtccatctgttcaccctcctctaggagggttttgtttttgtttttttccgagacaggatctggctttgccgcccaggcaggagtgcagtggtgtgatcttggctcactgcaacctctgcctcccaggctcaagtgatcctcccacctcagccgcctgagtagctgaaaccacagttgtggaccatcatgcccggccaatttttttttttgtattgtttgtagagatggggtttcgacatgttgcccaggatggtcttgaactcctgagctcaagcaatctgcccgcctcggcttcctaaagtgctgggattataggtatgagccaccatgcctggcttttttttttttttccttttaaactaatataacaatttcagcaaagccctatcggcttctcaggaggaaaccgcattgcttaaatatgggcaagataagactttgtgtttctctatgtggcaacaagacagtagaggcatcccctagaacctctgagagaaggagcagtgtggtctggggtaccagggtggggccgactgagggtctttccacagccccctgccagtgctccaggctgagcccccataacaggacgaactgcggcttccctggaatcaccagtgaccagtgttttgacaatggatgctgtttcgactccagtgtcactggggtcccctggtgtttccaccccctcccaaagcaaggtaatcttccagggaatcttcctgggccagcagctggcaacccaggacccagcttcacaggcggagcccagagcaggggccggaggaggcccagttgctagtctagggttagcctgggtgggttagtctcgagctagccccggttggttagtctggggctagcccaggttggttagtctagagctagcccaggttggttagtctggggctagcccaggttggttagtctggggctagcccaggttggttagtctagggctagtgtaggctagttagtctaaggctagcccaggttggttagtttggagctagcgcaggttggttagtctggggctagtagcccaggttggttagcctggagctagcccaggttggttagtctagggctagcgtaggctggttagtctggggctagcccaggttggttagtctggagctagcccaggttggttagtctggggctagtagcccaggttggttagtctggggctagcccaggttggttagtctagggctagtgtaggctagttagtctagggctagcccaggttagttagtttggagctagcacaggttgattagtctggggctagtagcctaggttggttagtctggagctagcccaagttggttagtctagggctagcataggctggttagtctggggctagtagcctaggtttgttagtctggagctagcccaggttggttagtctagggctagcgtaggctggttagtctagggctagcccaggttggttaatcggagctagcccaggttggttagtctggagctagcccaggttggttagtctgaggctagtagcccaggttggttagtctggggctagcccaggtttgttagtctggagctagcccaggttgtttagtctggagctagcccaggttggttagtctgggactagcctggactgctagtctagaggtagcctagaggactgctagtctagaggtagtctagggctagcccaggttggttagtctggggctagcccatgttggttagtcttagactagcctggactgctagtctagaggtagcccaggttgtttagtctggtactagcctggactgttagtctagaggtagcccaggttggttaggttggttagtctgggactagtctggactgttagtctagaggtagcccaggttggttagtctgggactagcctggactgttagtctagaggtagcccagattggttagtctgggactagtctggactgctagtctagaggtagcccaggttggttagcctggggccagcctggactgttagtctagaggtaacccaggtcagccaacagtgagatgaaaatttcccacctaccctgtttctacactgttagttctttcaacagacatgtgtgtgtggagccatcagttttactttagttgagaaaaaaatatatatatatatagtaggtctcctctagtttttgaagtgtgacttctgaagaagcttccatggggaaatgaaggtatttaataggacagcagtaacataagggctgacagccctcaaatgttagggaaggaagtgaagccttctagggttctttgggagtgagttttatgttagtgcacgggatcaggacccaagttgtaacgccgacgagtgctcaaaggaaggttgtgtgtgtgtcgtgcacctgtgtgcgtggaaccaggcacgtcctctggagaaggaggattcatccccaagattgttgctgggaggcttgctgggccccgcagggaaaccaggcagatggtggattgttcacgagcgcccactgaatggcagtgtctttgggaatcaataccatgtccaaacgctttccatcttaccaaggtgcccacaaaccttttctcatcttggcccgggggaccaccccatttactgagaacactgagtcccgagaggcaaaatgatttccccaaggcgggggactccagagcttctgactgtgaccaccccacatgggccccaccttcgcggaggacaggccagccaagcgtcgctggggccgacacttccacagtccccgggggaggcggtcccaggggccgacacttccacagtccccgggggaggccgtcccgggggatgctgccccaggcagcacctcatgatccacggaggctgcaaatcagcgctgctctcagaggaggaaggggtggagctttccagggcacagcaggcctgactgggtctcggtgctgtgcctgtcccatggcagagtcggatcagtgcgtcatggaggtctcagaccgaagaaactgtggctacccgggcatcagccccgaggaatgcgcctctcggaagtgctgcttctccaacttcatctttgaagtgccctggtgcttcttcccgaagtctgtggaaggtaacgtcgctgtgggactctctgtctggttcccggacaccatgattcctcctccgtccgtagaggtggggtgcagggaggggagctgcctcgcagcctcagtgccatcgaggccagggcccctgcctcctatgggattctgaaggcaattccagaatgttcttggcaaagacagcgtcttttcaataagtttatagcctccagcattgccactgcgtcatctgtgatggctctagaaacagcggctcatccctgttgcctccccaggtgttgcaacgttcagaggcgttgcctgttttattgcaagcccatctgcatttggaggctactgagtgtcttgcactgtgctgggtaccagagagggcccaactcaagcagacctggccccttctcccgtggcttccccgttctcccccacatgaccccgaatgacaaacctcatccacaacgtcctgctccgggcagtcccgggagggtcccgccggcagaggtgaacgggtccacttctcccacccgcttagtgatagtgtgttcctgactcggagtgtggcgaggtaaaaaaagaccaagcagatccaggaaaatggggaaagagctactggcccttgaaggatgccttttcttttccttttgttaggatatcaaagcactccaaagagcgaaatatttcatgttcaggattttccgagtgattttttttatgtgacctaaaggtccacctagaaaatgttcacttgtctggggagaatgcgccccacagaggaaactctggcctggggtgggaagatttggtccctttacaccccctccccgggaaaggagctccttcttcagtaggaagctcctgggcaaagtgatgcacgcccaccccagcttcgcagcctaggcactcccatttctggggttcccttaccaaccatcttgcatttaaacttctagactgccattactaagagaggctggttccagaggatgcatctggctcaccgggtgttccgaaaccaaagaagaaacttcgccttatcagcttcatacttcatgaaatcctgggttttcttaaccatcttttcctcattttcaatggtttaacatataatttctttaaataaaacccttaaaatctgctaaa

SEQ ID NO: 556 - DNA, 24701 bp, Homo sapiens
gcagtctgtgtaagttttcatatctctgagtgtgtgcacacagtggagagggtggagcctgccatcctcaaatctgaaaagattgagagatttcagagggcccagatgtgccaaaggtcagagggatcaatatacaggccctaccacggaaaggcggggaaaaggttcgaatagaaaactgctgcagaagggaagccactgagaggtaagggagtttctgaataattaaaaagttaagaataagcaaaaggaaggaggtcgggtgggggataaaaaaaagcagttgatgtggtaattaagaatttggtgggagcctgggcaggtcacctcctttctcagatcagagccccatcagaaattctttcaagtgtccttctgcgtcgccaaagatgacaacagcaaatcaataagtgcttgaaatgaaaggggatgttgactagcccccaggctacagatttcccgccgccagccttttctgaactcctatagcgtgcctttgcaccgcctctcttaagaagagctaccttttattcctattctcaggacgaaggtaagtgctcagttagcatatctattaaatgtcagctttggttccagctctccgtttgcgcggaaagctcactgccatagcgcgcccagcctgccggaggggcagacagaaaaagcaagcttggcctggcgacttgcggggccacgcacctccagggctggcccggagtcttccagagtttaacgctcctgggttagaactgtaaggtcccggtccgagcaaagggcctgagccaccgtagccgtgggagcgttccttccacttgaatgcactcactcacaaacaagcacaaaatctttttaacagcagaggagaaagacccctgctccaaaattaaagctgggaatcaccggaaactccgttttgagtgcgagatattggtctgttacctttctaatcttcatatccctcctgtaatatgtcttgatttaacaatctttccagcgcccagcattgcccggacgttttaattgggtaattcattagtgagtcaatacaggcatttatatattcttttagctcaagtggttaagtactaatttcgaaatgattataaaacaccggaatcggcaacgcatagtaattttaatttatatgcaaatcaattggttcatcttaaatgccttttttaaaaaaacaattattgtattgtagcatcggaggcatggatcaaacctctagaatagacaattcggaaacaagacctggactaggaagacaatttagaacagccaacaaatcaataatgtttgaggcagttaaacatcgctagccattggtatttacatactcgcttgttgtcagataaggagctggggaaattgcttgccagggttgagatcataatccagagtgaagaaagtaaatggtagcacacagcccgtcacagcgggctctgaaataatactgtacctttcccaaatcctgactcttgggtgacagggagttggcggaggtcaccccacatttgtccacggttttgccccaatttgatcacgaaattgttgttctccctgagctttccaatttgattaccattctaacggttctgtcacttgtctcaacatattggggggaggagtgtaattgagattctcattaaaaattatctgaacccacttagccagcactgtttcatctaagcttagttttatgggctgtatttaattccctgtgccccccacacattaaaatcagatcatcaaaatgtcggtaggaaagggtgaaggaaatggtccaatgctccagtttactggaagactattatctttagacatagttcaaaattttgaggaaataaaaaggatatacgctttggggggaaaatgttttaatattctagaatgggggtattactccccccattccagagaatccgcactggagttgtttatgtaaaaatgtaacatccttgaaattcacagatacgtaaggttagtgtctccccttccccaggctcccagtccaggcgatctagccctaaaggagctagtacctttgatgctacaatcttgtttacatctgcagggcagagaattgcttgctttgcttggacgctccctccacccccttctaatttgaagtaatcggaatctaaatacagtcgccaaggcccgctcttcctttactgctttgacaagggaaaaacctgaaatccacgtcttaaatcagctcggtggtttgtagccccccagcaccctgcttctacgattgcatgcctaatgtattccctggtgattctgggcattaattagttgtttaataggagtatgactaaaaatgtaaaagaaggattaggagcgtgaaacgtatgtccagctccttccacacactcgaggagggaatgagaatcattctgtatcttctatttctccaggagccatttgcatttcccaccagctgctcacttcagctgcactggcgctgggcaaggcgaggacccaaaagctcagcgcagtgtctgcggcggccgggactggggttaaccagcctctggcgggcgagactccagacagaaggggggcgagaggaacgtgagcttcccgagccccttcctctcagccctggtttgcaaacctctgaaacctgaaaggggagggagttgcacgcgcgtatctttgcgtcttttcagcgcaactcccttccctctccctgtgtctctccgcggatctctgaatctttctgtctttggttttctcattctcttccaacttttccatgagattgcctatcctcgccaccagctgaaggcaaggccgttctgctacgagcgcctcttaatctctacaaaatgaaaagaaaaaaagggaggattattagcccattactcagaggaatggggaggctgcaaaaatcgtcgatgggcagaggtgaagatgtctttctcggactgcactttccggtgtcctgtaactagagttcagttgtgggacttgttgaagaaatttgattttcttgcctcggcgagatttcaaaaaccagaaatagaaattctcagagtcagagaggaaatacaattaaacagcacgtgggcattttccccctcatttctctccccttaaataacactgctttgagtttccactgggtaaagagagaaagtttgagttttcacggatgttacgtggaggttagaaatggcttaaaatgtagatctctaatcagttttcttcgtggctgaagaggctaaccctttccataaaatgagtccatctgtcgactgttagctatttcaaagtgaagggatttagcactcaaaacaaattgagcaagtttgtttgcctgtttttactgctaactcaaatgaattcaaaacacggagtaattcaagaaaacacataacatgttccagacagcccccaaaagtagggaaagcccagcacctatatagtgactagggttagttttaagcgccaagcttttttaaacgtatctattttatgcacattctcccgagtcactatatatttctaaaattgcgagtattggtatattgatttaggaagagcaatacaacttttagagggaactttattctcaattagggaccaaagagatgtctttttaatagcgggcctgagttttgctctcaagcaggaattaatattggtgggaaaatccgaatccaggagcaatggctgtgttccggcactttccaaaaacatacattaacaggatgcccttgagattgaaaaaacattgtcccatatgcctggcagaagccttcacacctggtcctccaggcgaattatatttatagtccttccactcagaggcaggacagagccaaaatattctgctcactaccaaaatacacatctttgctcaagtcaagaaatcagaaaatcagggttcagaagtaaggcacacttttcgagtgagaatatgccctgtaatttcacatactctttgctttgcaggagcaaatgtggacttgagggaaactctctcccccacccccacttctatcccgtgcaatttaataccatcctcgccaggaaccttaacctcgtcattttaaaaaatgagatatccgtgacccagggtgaacttgttgaatgtaggtacagcagaggaaattctagactctatgagcgtctgagccttgtccagtgcaaacccttcgtgaacactgggtcagtgcgtggccgtgcccacctgtgcgccgacactctcagcatgcctggtccacccgccttgacctcgggcgcggtgtcccagctaagctgggcccagcgtcccggccttccccagctgacaagcctagctcgttcgctcccggctgtggccctcccaccctctcccactagctcactccattcttctagatttctcttcactcatcctctcccatccccaccgcgcccacctccactcccgccctctaccggtctctcactttcctccctccgcagtccctctttgctgtgacctctttcctcaactctgcaggcctgaaagaaggtcacacacgcacgctcacacccacactccacacgcctcgtcccaaacaaccccatgaacattgtcctttgttccgtctcttgggccactttccctgtcgcttcctcccagcccgtcctgatttgctccccaaaagtacgtttctgtctccccgctgccctggcgctccccctttgatttattagggctgccgggttggcgcagattgctttttcttctcttccatcccatcctcccttctggtcctcctttccacagtgggagtccgtgctcctgctcctcggttggctcctaagtgccccgccaggtcccctctcctttcgctctcccggctccggctcccgactcttcggcccgctggcatctgcttccctcccctgcctcgtttctcgtcgcccctgctcgctccccccggcgctcgcccgggcgctgtgctcgctcctggatcgccagccgcgcagccgggctcggccggccgcccgcgcgccactgtgcagtggagtttggtggaatctctgctgacgtcacgtcactccccacacggagtaggagcagagggaagagagagggatgagagggagggagaggagagagagtgcgagaccgagcgagaaagctggagaggagcagaaagaaactgccagtggcggctagatttcggaggccccagtgcacccgtggactccttcggaacttggcaccctcaggagccctgcagtcctctcaggcccggctttcgggcgcttgccgtgcagccggaggctcggctcgctggaaatcgccccgggaagcagtgggacgcggagacagcagctctctcccggtagccggtaagtggaggccatctatcccgcagggatgtgagataatgcgagtctggaaatttgttccacttcggagaatcttcaccgtaggtgatttgtggcttttggggctaagtttcgcccaaggtaacgcagtcggcaaacagaccttgcaaagccctgttcctttcgtcccccgccacagacactaacaatctacagggtgctgaagtcgagagggaagccagaccgtggctggcatttaaaacgaggtatcttcccttaaatctcggtgccaacactgcaggaacaaatcctcgggccaaggattagcattctcaagataaagggctgggtacaaagtttcagctactggaagattagcccccttcccattgttatccattgggaaaaaaaagaaaagaaaaagattccatcttaactggcagttagtgacctctcaggcccaagcgaattacctgggagccaggcctggatgccaagctctcaccatttctttggattgtaactcctttaaattgatcaccagtcaactccaatctggcacttcaggagatacactttaaatggatgcagagaattattttccagctggagattaagaaaaaaattttcgattctaaacctccgaaatatgttcctcttttccagtttaaccactttactttcttaagcaatttagaaatcaaactatcataaggtggtgtgatttttttttactcttttgtgtgagtattgtcttactaaactaaacggaaaaaacttttaccattataaatgtaaatatcagaattcatacattctaaaatatttttatgaaaaattaatctgatttaaagaaatttccttgcatttgttttagtctatcaatcaaaactaaagatgcttttatcacacaaaatatcattttggcagaaatccatctaaaattcaaataccaataatatcaagaaaacaaagcacataagcaaaataaattgaagatttttgttgatgtaacatgagcatacaacatttcaataaccaaactttccctaaaaaattaaatagccacttcatttgtggaatgttttactttaactcagcaaaattacacttaaattatttaggtgctttgttccttaagttaagcgtgtttgtcttcaaatgttcctaaagcacttatattaattggttgtaaagaacgcatacacatggtaaaatacagaactgaactgagcagtattttaatttccttaaataattacttactacaaattaatttactggctaatttcacaatttagttcatttaaaacacatgttcctgtgctgtttatttttaaactttccattaaagattttgttatggggtaacaaagtgtatgaaaaggggggaaatgtgaaaggatctgggattattcgaactgtatttttcctgcactttcagtcttgcggtagtcatcagaaattattttttagcaaattgttttatttcttagggcttgcctgcctgctttgccatggttcctcgtcctccgttagccgtgtagtgctttttgtgtgctcacaatataaaacccaagttggccaaaacaagagtccttggcatatacattccaactagaacatgaactttgggggtgagaactacctcccatcaggaaaagtctcccatctcaatttgtgagattagccattgaagccagttccgaagtctggcagccaaatttctcacagaagacttgtcttgatagggcaagtttaaggatcagcaggcgggaattggaggtctctttttaaaaaattatcttccccagttatttagactcagttcttctagtaggcctggtcattaaatgaagcataaaaatgcaagtctcaaggctcattttgactgcaaaataaatctccaagtcacaaggacatgtaggagtgagctaaggaacacgccttgaccttcttttcagtccttagagtggagctctatgagttcttgaagatttgttttgtattgctttgtttggtcttcagcactgaagcacggggaagtggggggaagaatgtgtaataattgactgactttacaccaagcaacgcaatctttttcttttgtatatttcattctttaaaaaaaataaataaataaaaactatttgcagttaccatctgcagtgctccggctaccagctaataatgcagccagttcagacatataaaaaaaaaagattatcgaaatgatgatgacatgcaaatttcctccgaaattatcataagtaaacatttgaagtctggactaataaaatcccatctgtgttacttcatatcgagttagtagaaagctgtgataatgaattttgtaatatctcacgaacagacatctcaatcagggactaatcctgtgattttactgcagaatcactaaatctggagccgccaaactgctacttctgggcccacgggcccacaaggatcgaatcggcagagtccccgcccgcgttctcgctagcgggtgggggaaccgcctggccgtccccaccctggatccccacgccacagcgccgggcagcccctcctgtaggcagcgaccttggccagaggctccccagggcccagctcccttcaggagaggccgagacgcagggaaacggtactcaggccagaggcaggcccgcagctccctgccccgcctctgtgcctccgccaacccgacaacgcttgctcccaccccgatccccgcacccgcgcgaagtgggccctccggtcgtcggcgtaccctggttagcgtggagagaggcaggcgctgagatcgaaggggcctagggagccctggaccttcttttcttgtctttaaagcaaccgcggctcttctacccacccggtggagcccctcgagacccacctctcccggcttgcctgtggcagagaagggggagcgcgttaaatgcttggctcgctgcgttgtggttgaaaacgtgaaaaagatttggctcgcccgggagagaaagggggagaactgggtagcagttataccagagctatttctccgtccttggcgggcagtaaaccctccaagaacgtttgccctgctctcctcagtctcgctcagtccacccagtgtctctcctctgcgatcttaaatcatactttagggtaattatttgtagtaagtaaataaatggccgggttagtatctctaggagaaagtgtggctaaatatggaaaagtggctcctgatggatgagaggcccgaactcagctcgctcctgaaacaccctaggccaagagcccgttcgtttcagaattacagaaaaccgagggaaactgctgtctaggacaggggcacgttggcgctgatgttctacaaatgtttaccgagctccaactaatggacaagcactgaagggtggtctttgcatacagcttcccaaagagaaaagtcctctccacccacccactcccgctgccattgcgttcagatgagttcttaaccccggcaccgagattcttgaaagtaggtccacagcctccccagcacactgtggctttatagtcctctaacctctgggcacttttgcggcaactctggagggagatcccctcttgataaataaatgtcctgggcccgaggctaggctggagatgctgctgcacagccagaggctgtcaggtcggaaaaacacgcctgaagcctagcacacagtaggcgcctaacagctagtgtaacgtagtctcatctgagccctgctcactcgacggccgccgcttcttacagccttccttctcttctgttttgcagataacggggaatggagaccaactgccgcaaactggtgtcggcgtgtgtgcaattaggtaagaacccccttctcctgcccgggtcatcggacgggaggccgcgccacgtgagggcggcaagagggcactggccctgcggcgaggccccagcgaggggcgcttccccgaggggccagcctgggcaggaaggaaatcagaaccaaatcgccagtggcctctccctgtggcggggcggtggactaggaagcagcggcgcgctgtgtaccgaagccccccagcctactcctcccggctggaaccgccggcaaccggggaggcgcagaaagagtacgccatcctgccccgggttgccagagggtccgggggacggggatgccgtcagctctttcctctaactgggtctttgctctttgtccctctttctcctccggcctgcctcgcccctccccctcctcccgtccccggctcctttcggccgcggtccgggacgcctctctccgcacgtggggcgggcgcgcgcgtggcccaggcgtgcagccggcggccgttgaatgtctcttctccaaagactccgaaatcaaaaaggtcgagttcacggactctcctgagagccgaaaagaggcagccagcagcaagttcttcccgcggcagcatcctggcgccaatggtaaggccgggagggaagcgcaggccgcgcgctgggcacccgcctccgggactctgggcctcgggcgaagcgcaagaaggcgaggccgccagacctgacgcgcctgctgcttgaacttagacactccgcctctgggtgggacgggaagcagccgtcccagggacgttaattcctttccccaaattatactgcactcctgagacccaacacctctctctccctctcgctcgctccctgtggtctgatcccctgcgcacgctccagcaaacctcggcgtctaggctggcgtggaaaagtggtccaacagcgacctctgtcgctcgttatatcccgctgcgcgcagcaccaccagggcccactcagtcactcaggctctcagccacgccccacccagacttgtgggtgcgcggttcatcgcgggaggcaagcaagggaaacttgagttggcgaaggtttgctttggctggttgggggaggggcggggggccgacaacatccctgaagagctggagggcagccactgtgcttagcagcccagggtagaatggaggtttgcccctgtcgacgcgaacctgcctgaagtactggttgccaggccttgggttttggcgatgtcgttgcttgattggctggtttcactctggaggaatcgagggacattgccagaggaggtctacaggcttatgtaaaaagttaaaaagtctccaacctacgccacaggcctttcctgaattgaaacttgttctatggggcggaggggggggtgtaagggatggaggagggaagatgcctttcttttcaaatacatggaaaaaaacccctcaaatttactgttcctctattttcctggctccgtagtaaataagtgcctagccttaggaggctattgacctttgataatgtgagcagataaagcccccccccccccacagccctcggcccctaaccccctctttccggattaaagtgtaagaatacaaatgtaatatgggatggaggggggcgatttgggaccccggtcaaaaaaacaaaccgtattactaagaagaaaacaaaggtcttgcattggagtttccccgtgaatctgagagaaaatgatcatttgttgaaatgaagcgtctaaagcgatccagtgcttcacgcccggacactgcactacaccgccagtcgccctgctgggccagttaaacgctcacttgtccgggattaaccccatggggttaaatgggggcaatgcagagataacgtcgcgtgatttctgtcatttagattgtgttaaattcttcttctgtttgataatcggtagtaaaaataaattattagaccgtagtatgtttgggatatggttaaaaatcaagagcagcgatgacttctggggagaatgctttgcgcgggctcagccctggctccggccagactagaggagctccccaatctcgcttcgcgcggggcgggctcgcagtcgccaagccgaggctgacatttcttattgtgctgggagccagagagacgcaaaatgtctccttcccccagtccctaccccaggtttcctagacatggggaatgcattctgaggacaggtggagaagcctacggtaggatggggtcctcgtaggtgagcaggaaacggctaagagcagaggagttctgcttgcgccagtcacaagccgcgcaggcgcccctggtcgttcgcttttgataactagcacataaagaactagaaataatgaatgattgctttcttaaccattactttcaggcccgcattgttttagtgcacgtgaaaggctcttcccctacactcaatatgtctttttctactttttgaccgaaaagaaaaattgctgcctaaacacgtttaatgccattaattaagaaaaggcatgtaatgggaagaaatgctgaaaatcttgatttaattggcttttaaggaactagtagacgacaaaaaaaaatcacacgagtgggcaaagctatagcactgctgaaggatagagcacctatccttccctgattttaagttaacttatggaatatccaaagtcctggccacagcctgcttgtaaaacaaaaggatttatttcttgtgtttttttaaagtttttctttgcttttaaagagaaaaaaagttcacaatgacatatgacttcttcaaaaggccgtgatagtctattacgctaccctctccgcctctgcccccaacgccgcccaaaaataccatgtcctcgttaaagactaaacgttctgtataggcagagtccacctctaagcagtccaggctctgccttccttccctagtgagtcccattctccttggtatccattgggcggatgcccagcctggatagaaccccgaaacgggggtagcacgagagcgactggagacccctaaaagccagaggtttgagagagggtggacgcagctagcagaagatggtgtagaagccagctgagaacgaccccctagagcaaagagacctttctttggcttttcttgctttgggggtcctgaaaggaactcataaaatggtcttcaccctcaggaggaggacggactgaccctcctctgtcactggcttaaaaagtttcagggcggcggctctgggttccgtgctgaaatcggactgcactgcagcccctttggacctgacgcctggctttgcgtcccgacaaggggcgggtacttcccccggcctcccccaggaacgcattaattgttaaatagctttggcccagtggatgggctgaaagtgttcgacccaagtcgctggtgtgcacagacttcctccctctgggaggtgggctccatggcccgttgtggcacccccagccgcgacacacaccttcacacgcggcagcagctcggtcccaaccttcttcgaaggacctgggttaaccctggcggccttggcggccgcagacccctctccgccgccccgcccccgcgcctctcattcaatcagcgaatgtttgcggagcatatactacgtggactcctaatgtaccccctgaaagcaaataatacagttttcctcgccgtcatgaagggattttaatcctaacatggacaccagcgagatcagcccagaccgtctctagcaaaacgcaaaatggtggtgcgtggggtggtgaccaaggtcctgagccttgtcagaaagaaggggatgtgtagagaaaggtggagaactctagctgtggctagcgcggaagggacaggtgcttgccgaagggggcatgaggcttgaggaaaaagcaacgaaataggggtaaggagagttttccattttctttcctccgcccgacctccgccatcccattctcccctcccctcccccaccccccgcgccaatcaaatctgcagctcacttgaaaggtgccccgccgcgttgtggtttttcacccccaggggaaattgtaccagttgtccgaaagtagtcagtccctgcggatccctgcccgcaaaagtggtcttcacaggtcgcgttcctcgctgctgactcggtacacaaagtttcttaaggctggttcggctgttattcctcaccgcccgctgctaatatatgcagcagttgttagagcggctcgggggaaaaggaaatgtataacgaaagcttattcgtgagcaggaatatactaatggaacaatctgatgtcttcttaatcctatgtaaaaagctttgtcgtcttcctaatattgactgaatgggtaattaatggctcttcatctaggcgaataccctgtaatccaagataggcaaaagacaacaagcccaaggtagaagacaaaaggcccaactgcagcggcgtttgcccgcctcctaccccccagggtctctgactaggaaagttttctctcagaggagaaaaaggcaggagtgggagaatatatacctatcatttcggggctagacttcaccgcagcacctgaccacccagctcagttttctgttactctgtctttccacctccagtccttctccctgcatttttttttcttcttaactcctctaggatgacctcctaccaccaccgccattatggtcctaataacctttccccctaaaccccacatctttcacttcagcaaccaatgaggctgttttctgatccaggaggagattcttttcttttagaacccaatgcgtagagtctttgagaactaaagtagttggtaggggaggaagaaattaatagaaagggagagagcatacagaattgtgtgtgtatgttaaagagcgaccaggaatgacagagtcaacttctttgtgaggatctgacgggaagagtgtccaagactctaccagcatgtttttaacaggctgacattttaatttaaacctttagaagtaatatattacttgggttactacaatgaggtgggttcctttttttttgtcagctgacagcttttaaaatattatttcgctagggaaataaaagcttcatctcagattataggtgggtatttttggatttaggtgatttatggtcaccatgacaactaatgctgaatgttagctaccagcatgtctgggagagagaaaacagaaagaagggagagcaaaagaaatagaaaagggagatggacataagctggagagggaagaaaagagaaaaagaggaagacagatgagtgtttaatccaactgttgtttaaaaaagtggcgggggggtgggacttcatttagccccttgccacttccttctttcctgacctggatatctatgctcaatttcatattccacccttccttccccttctccaaacacatgtgctataccattctccttattttacttagttcggcaagtagttgctttctggagactcagtgacacctaggaaaactgtggcagtaacatgcaaatgtgaggaagcattaacagcatgttcgttgagtgattttagcaaatgccccctcctctaatctctttctcttctcttccccaggccactgtgaggtggtaactcccactgccatctgaacactgttcccccaggtagttaccccaaatctcaaatggttgagcagctagagctgtgggttggaaaaatgggtaccatttgcagggacccagagagggtggctgttgctcaatatatctacagacttccaattcagaaaataatcttccccttttgacaagccagagctttttaaattccatttaggaaatggggaaaaggacagctacagtgaagcttttaatttctgggttatttggttccatagctatgaggggtggtgggtagtggactgttttcagcttggtttgtatgcagagaaaagccagatattggagggggtggggcacttctcgggcaggatgcaaggtctccatctgacctctgcgccttaccaggagctcacacactcacgcccatcacgtggctccaagctgagtccaggcgggcctcgtccttgagctagcttgggcagggcaggactcccacccgtctaaggcctaacagctcagggagatgtctaattaagccatcttctgggtgaactctgaagacagactctttccaaaagtcagagatcacttggttgagtcccaggccagattgatacggagagtttggcggcacagcccaaccgctcactgccatggccagagggactttgcacaactaacactgaagagtgtgaaattaaataagactttaagactggtaatcggtggcaaataccagcacaaaacacggctgaccccatgtcacacatttccctcctctagggtctttctttgaaagaataagcaagaaaccccaatcgagacaacccctgatgtctcccagactcaaaacctcacgccggcactgggctttccttctttgccccacgtgagccatgcagcacctctagtttccctaccaggatcccaccaatgttctccgtattggaaatttctgtgttagaggctgaactcatagtaatttctaaaaccaattaagaagaacttagccagaggtcacagtaatgctggaatcacaaaatgcataagatttattttcttctggcccctttctcatccatgctgcctatgcctgtgcacccacaagtcttatgtacattaaatctccaaaatcaaccaccaccatgccacagagttttcactggacagtgtttcttagttcccaccacatacctccttttccccatgcagacttatcatgttggtgtcctgccacacagggggcctgagaagaatgtcacccaatcgccgctgctgtgagtgtgtaaagtgattaggagattaggagaatgttgaaactcctgctggaaaaatgcaaagaaaatcctcactttgagtcagttgtttacagagccagtgtgtgtgtgcgtgtgtgtgtctgtaatataaaatggatgtgaatatatatatacaaatagatatggttttgcttttactttaatctgaattatctagataattgtctttattcaccacttgacttcaatgggtccacacaaattaggacaccttatctttttaggcatctaggctgctgctgatccccagtgcttccaacatctcgcacacgttggcactatgaggagcagtcacgtgcccttgggtttttcaaccactttggaggctgattgaggtccttcatacatgtatatttgtcgtgatgaaagttccatcggtagagtggagccaccagagcttttatcaaaattctgtgggtttatgagagatgggtttagaaatctatatggctctgtggggcttctcggctttctaaaataaggcattaacacccaagcttccaaaaatatttgcagctctggggtttgaatcttgaaaaacaaggagtgaggggctgtgtatactaactacagtggagatttttttcattctttaatgtgatggagtcccttcatgaaatgaagctttaaggggcatggtattgtggggaccacagctattctgaggtttaaaagaagaaactggaatatgattagtaaacacattcagcagaaaagagctggattcttattgacttagttataggtcatcggctggcagtgcaatgggaggaaatatttactttacacatatactttatgatcttgggggaattagaggaaattcaataagaaaacggctagaaacatttaaaacccttatttaaaagacttaagcaaattagagtcttatcagattaaaaaccactacaaatgtaagagcattgtcttcagtgaaacgctgtggggtctgagaaggagattctccgccaaatctccgggataaaatgcgtcatttaagcaccagataatgagcagaatgtaaattaatttaaccttctttaccaacaggctgctagtgtaatgtgtataatttagtgataagattgcaggacctaatatagctggatgtatgagcctcagctaatgcagacctgtcacatgaggatgtgttttactctgagcaggtgtctgtatgtgtggaatggggtaaagtggaataaaaggttaaaagcagaaatgctgatttaaagcttactatgaagaaattcctcccttgcagctaaattattcttaaagtgggatgatactggtgaagaaagactgaaaaacaattctcatgtgcgtctttggactgcaagtttaaaatggggaggagttgcagatagggtttgggggtggtcagggcaaaggagagacacataagttgcaaatatatttgtagtctgcttcatccactttgttccacatcgaataagtttcccaatcttgtgaacaaggacaaggagggagtgttttaaagatacttcatgctggcattgcaaatcattgactgtaatgtcaaacaaatacacattcagagatgataacactaactccatagtaaaacaatcgcccatgcagaaacccagaggagattagtttgtcctctccagctgacctatgctgggggacaaaaggactttcaaaaattattttgaatatgtttggatttctttctttaatttctttggaaattaaatttgcttggaaacagtgctataaagagttgatgtctccaaaggtgattttttttgttttatataaataaggttttgcttttgctagttgagcgcagttctaggcttttcgcccttagctcacacacaccccttctgcctgcttggactttaatggctcaagacagccttgagctcactgggaaaagaaaatgactgttaaaaattatccttgaaattggttatttggcaacattcttaattgtatggaaattcattaaggcatatttcatatataattagctcaaggttgttgattctacaggctttatggatttaaatctgattgataataaagtaaacaagagagtcgaatttaaagcgtggctctctcgggttaggacgagcttaatacagtgtacaaggaatttgaaagatctaggatatgtgtcttaatcaacgttaagtagaatggataagctttcagcattttgaaaacgctgggttagggtttctcttctattgtgtgttttctgtctggggactaataagcatcacagagaacgtgatctgaggcgactttttattcttgtataaatccagagtgaaccaccaaacagttgttcgtttaaagtcaaggtaattttcttttgacgggtccatttgcttctcgatttctaatttattagcctgccttttcagggctctgtcttctttgcaattaaagcttcttcagattagcgcagcattcacttgacaggctgtttggaaaatttaagatcggagaggtgatttgttgctgtttttcaaattttctagttttaagtaacgtgtctcctttttatatggggtgggggattggaaatggatgtagtgagacacaaagagtgggtgtcttgttgatccttgtacctttctcttcttgaccattccactctcttctcccaagccttcgactcctagcctcatctcttcacctttgggttcgtactaaaagccggatcgccttgggctgggcaggagctgaattcccgggagcttgcctgtgtagacccagtgcgcacggcgaggcagtagcccggccccgcactgctgataggtgcaggcaggacagtccctccaccgcggctcggggcgtcctgattggtgcggagccacgtcagtcgcacccggagaagggtctgggaggaggcggaggcggagagggctggggagggccgcggcggagtgacgtctcggcaccaggaagcccgcctctggttttaagatgttaggccaacagggaagcgcggagccgcagatctggtccgtcgctcgcctgggtgcctggagctgagctgcggcaaggcccggctcctgttcgaccgcccgaggggtgtgcgtgtgcgcgttgcggagggtgcgctcagagggccgcgtcgtggctgcagcggctgctgccgccgcaggggatctaatatcacctacctgtccctgtcactcttgacacttctctgtcagggctgccgcgtggggggggggcgggcagagcgcggtcggcgttagctttccttattggaggggttcttgggggagggagggagagaagaagggggtctttgcccactcttgtttcgctttggagcttggaagcctgctccctaaagacgctctgagtggtgcccttctgcccacatcccatgtcttcgtttgcccgctgactttccgtctccggactttttcgcttgagccttccggaggagacgggggcagcttggcttgagaactcggcgggggttgcgtcccctggctctccccgcagcggggaaactccgcgcctagagcgcgacccggagcgggcagcggcggctacgggggctcggcggggcagtagccaaggactagtagagcgtcgcgctccctcgtccatgaactgcatgaaaggcccgcttcacttggagcaccgagcagcggggaccaagctgtcggccgtctcctcatcttcctgtcaccatccccagccgttagccatggcttcggttctggctcccggtcagccccggtcgctggactcctccaagcacaggctggaggtgcacaccatctccgacacctccagcccggaggccgcaggtaaggcgccgcgccgccctgcagacattcccgctcagctgctctgcgccacccgctccctctcgccccaaggaagtcagcccctccggggggaggcgtggtgggagtggtcgttcgcctggctccccgcagaacttccgggagccggaattttgactaccccgcatccctttagttctccctcgaccggcccggctcctggggcgctaagggcgcgagcaattctgccgccctctctattcgtaccctggcctcccttctgtttcctgggtcacaaaaatcccagcatcttgattcgaggaccttcagaggccgccgacctctgtccctgttttcctctcggctttcagctcccgaggagctccactcgttaggaaattgcctgaaaccactcagaaatgcccttcgcgaagaggcattttttttttttttttgggaaagggccggcgaacttcggtgcccaaccgaatccccacatcttttcctagccttcccaaaccgcatggaaatctgagctttctgcgagggggaggggggtctgtaaaccacgcgcgtgtgcgcgtcccaggagatttggtgtgtctgcgcagaggtgtataaatatacttgaaagcacaggctataaaagtgaatgtgccgctgcagtgagataaacatgtaaataaaacgtgcggcgctgggggaggggaggaaatggggcgcggacacccacacttgcgcctgcacaccccacaggcgcagcgctcctcgcggcccggagccgccgcgcgcaccctcctccggcgccaggcagcccagctcttccacggcttctgccgccggtccagttggcgtccgcgttgcaggtgggcatgctgacgggaaagtgtgtgtgtttcgttttcagagaaagataaaagccagcaggggaagaatgaggacgtgggcgccgaggacccgtctaagaagaagcggcaaaggcggcagcggactcactttaccagccagcagctccaggagctggaggccactttccagaggaaccgctacccggacatgtccacacgcgaagaaatcgctgtgtggaccaaccttacggaagcccgagtccgggtaggagccagcacggagtctgggagggatggggggaggatgttgtggaggtacaggccaagtagaccaggagagaatgtggaaggcagcgccgcctgggagggcgccggtggggcgcagctttgcaaaggcagaaggcctcgcggcggcctggttgcgagattacagttccctctccgaggccgacaggactgccgccctggctcaggctcccagagcggcaccggctcactgccccgccatcccgcgatctcacgagctgggctgcatgggcaatcccctgcacaggacattgtgttcctggcttgcagttgccagagcagagctaataaaatccctaccaggccaagagccgcgaacaggctccaacctgtgagcctttaacaaggaaaacccgccagagacacggaagagttggccctccctgggaaacctttgtcccggccctggcccagctttttccctcctgggctcgcgcttcttacaccttctttacggttgtttcggccattcaggtctctcccacacaccctatttcctagttttgtgatctccgggagcaaagttttaatacacaactactagtcctcttagaaggagaaagaaaaaaagaagaaagacttttctgcttggtttatttatcttctctcaggagttgaactctggaaattgaaactcacaccccctcttctaaattataatcatagttttgtaaaaagggcttaccttaactttgtagcaaatctgtactttatggattggcaaaaatgagctcaaataaataacccaatagcaacgtcctggtttatgctggtcggtggaagattccaaatttgttaggattctggaagcagaaaacagaatcaagcaaatcaagcggcatccagaggctttgctgttaaaaaaaaaaaattaagtgctctgggtagaaaaaataaagcccccggttagagcagagcaaacaaaaagaagaaaacaacgataaaaagaataaagaccaaaatgctctcccaaatcagagggaatgaagacactctctgggtggcatttgtgcaaggcatgaggctatgctggtggataaaaggccgggaagaagttgaaaatggttttagtttaactgtccagagccagagctgggtcctgggcggcgtggttttgagcaaggtcagtctttcattagctctcttgcacatcaagggaacgggcctctcacgtactcttctcgcctgagcaaagtttagatggcctagggtagaaatggcaagtaattaaagacagagtctatgggttttctgggatccttcgaaaacgccctcccaccccgcccgctattccgcagctccaccctagtgctttgtagccgcggcgctgggctctccttgcagctgcctctccttccagggcggctgcttgtcgagccaagtgggagtgaggcgtgctttttatagcagtcgggtgcaaagaggaagggggataaaaaggaaatcaagaatgaaaggaaaaagagaaaaagcggattacacggctgggcccggcggagatgtgtaatgtgaaacatcactggtgtcagctcggatatctcaggccaggcctctctccaatacacaaaagccgccgtctggggcgacagggaggcccgatgtggattgggatcggggttgcggctgggccaccggacacgggtggaagccggccggcctgggtggccgcctgcaaagccaaacgacccggctgggcctggcgcgcggacaggcctgtggtgggcttagggtaaagaagaggcagagcgaaagaagggggaatctccaaaactaccctttccgggttcccggagtttaatatgccaagctcctggagttaacgagctgacgaagaggtggtcttttgctctttatttggttgttttgctaggcgagaaagagtgttggcggcctagtccctgttaagggagcacgtaccagggggtgggggacgacagtggaggtcagggaaggaagggaggaattgcgtgggagaaagagcgatcctctagtgcccttccagccccttctcctcatccgtgggtctgtggctttggaatggaagcaagtttgcaaggtgccccgggaagggttggaaaagcctgctgccccgcgtttgttttacattaagtgtttttggacctggagaaacgcctggctgagtgatcaaaccgtccgcaggtctccatgcgttcggctgaggtttgtggcgtagctccgagtcccagctcgcaggccagagcagaccaggtctcctgcgcttggtggagacccgggccagtaactgaaagctggccctggtatcttggtgtgcagggcggtgcagtgaagcgaggccagggtgtgtgagtgcgctagcgtgtgtgtcgggggaaggcgggggttggcctccgatggaagttttagtaatctgcactgtggcatctgtttgctcccttgccccaaccgcccccaggtttggttcaagaatcgtcgggccaaatggagaaagagggagcgcaaccagcaggccgagctatgcaagaatggcttcgggccgcagttcaatgggctcatgcagccctacgacgacatgtacccaggctattcctacaacaactgggccgccaagggccttacatccgcctccctatccaccaagagcttccccttcttcaactctatgaacgtcaaccccctgtcatcacagagcatgttttccccacccaactctatctcgtccatgagcatgtcgtccagcatggtgccctcagcagtgacaggcgtcccgggctccagtctcaacagcctgaataacttgaacaacctgagtagcccgtcgctgaattccgcggtgccgacgcctgcctgtccttacgcgccgccgactcctccgtatgtttatagggacacgtgtaactcgagcctggccagcctgagactgaaagcaaagcagcactccagcttcggctacgccagcgtgcagaacccggcctccaacctgagtgcttgccagtatgcagtggaccggcccgtgtgagccgcacccacagcgccgggatcctaggaccttgccggatggggcaactccgcccttgaaagactgggaattatgctagaaggtcgtgggcactaaagaaagggagagaaagagaagctatatagagaaaaggaaaccactgaatcaaagagagagctcctttgatttcaaagggatgtcctcagtgtctgacatctttcactacaagtatttctaacagttgcaaggacacatacacaaacaaatgtttgactggatatgacattttaacattactataagcttgttattttttaagtttagcattgttaacatttaaatgactgaaaggatgtatatatatcgaaatgtcaaattaattttataaaagcagttgttagtaatatcacaacagtgtttttaaaggttaggctttaaaataaagcatgttatacagaagcgattaggatttttcgcttgcgagcaagggagtgtatatactaaatgccacactgtatgtttctaacatattattattattataaaaaatgtgtgaatatcagttttagaatagtttctctggtggatgcaatgatgtttctgaaactgctatgtacaacctaccctgtgtataacatttcgtacaatattattgttttacttttcagcaaatatgaaacaaatgtgttttatttcatgggagtaaaatatactgcatacaaa

SEQ ID NO: 557 - DNA, 394215 bp, Homo sapiens
cctgcgcggcggcggcggcgaggcgggggagcgagtgagcgcgaggggcgggcgcgagtgactgtgtgagtcacccgtacctggagtgcgagcgacgcagagccagcggcgcggagccggagccggagccgagacccagcgcctgcgagcccgagagcgcggccggccccaggcgccaggccccgtcgccctccccgtgcactcacccgtggcccggcgccgactccctacccggcgcccgccgcccgcagccctcccgcctgccaggaggcggtgcggggctcgccgggggatgtcacagcggctcctgggagccagcagccgccgccgccgccgcccccgggaaccgcgatcatgaacccccagtgcgcccgttgcggaaaagtcgtgtatcccaccgagaaagtcaactgcctggataaggtgagcgagggggcgccgggccagcctggacctgccgggcgaggggctgcacctgcttcgagaagttttggcacctgggatggaaagcaatgagtgggtcggtgcgtgtgcgtgtgccttggcacggggggagggcgcgcgaacgaagacgccagcgggagtgtcagagaccacgcttggcgattgtgatgttggaaccgggaagggcttttgtcgcggtgcggggcggtgcgacatcggcagagcctctgcggagggcgcacggcggtgcgcagccccggaccccggagggaccaggctgggcacccaggggggcacttcggcgagccgcgccccctccacctccactcgtgttccacaatacccccgccccccgccccacagatccgcccgcgatcccacctcaccgcccacccgcagcgcctcctgtgaccgcggcgagggggagaggcaaatagtaattaatatgtcatggggcggccgctgccgcattgctaagaataatccctgctggagagctccggctcagcgcggcaagccggacccacgggtgtctaatccaccgggtggggaattccaggggaagtagttctgtagccgggcccctccagccctgccccctgcccttcccgggcagggacggagatgaacagcccgggagagagacacccaggagcgatccggagtgactgacagttgaaaccagccaggggcgttctggggaaatttgcgtctgaagatacaaatgcttccttagaacaagctgccatcctgacagtcatcccgggcagagtccgaggtccagcattttagtggaagctggtcaggtgtaggggtacttacatagctctcgtgcagccccctcagcttgcctgacttcgggtgaacacatatttattgagatcctacaaaccctgcatttagacactttgaactggattccttttggtttcgaagccactctctgggccccgtttcttcattaaccgagctcagaaatcgtttctggctgctcaaagaagtgctgtttcgacagaaccttgacagttcgtccatggtgcgtctgtgtattgcggtgggttttcctttaagactccattttcagagctgcctgctttatttacttagctgaaagtaggtaaacacatccccagttccctacactctttttgttgtaatattttcagctacagggactgtgatgcactaaaaagccttccttctgtgcccatcctggtgagaactggcattgtactgtatttttaaatgttttttttttttttccagtattggcataaaggatgtttccattgtgaggtctgcaagatggcactcaacatgaacaactacaaaggctatgaaaagaagccctattgtaatgcgtaagtattgtcaacacgctgtccaggtgtggcacagcctcagagcttgagagccagtggacctgcctgttttgaagaactgactcactgtgtcacccaggtgtggcaggggccagttacctgtttatatcacagactctggggccatgtactttgttgacgatcactgctttttatacctttctaatgtgttgggtaacgtctatgcatcttcaatcaggttagtttttgaggttcgcagtgttacagccttagggacacttattagaagctgctgaacttccccactgagaacgtgtgggctctgaagtgcatgtcaggtagatttccattttaatcctgtgtcaatttccattttaatcataggatgttgccatactgcaatttcatacctgaacctagttgctatggaaaggagtcttgctcatttggtcttagctgagaccactgcagagattctgggcttaaacaggaaatcaaagaatggtttggagaatggaaccaaagacatgggtattcctggctggttagtagtaggtcgtttgtagtagaccgactgaagtagaccgggtacttccgactggttagtgctgtagtaggtggggattaaaaaaggtaagccttctttggaaggcttttgtgtaggcatgctgctagcctagaatagcaattagctagcatttatatcgcgctcaccgtgtgtcaagctctgttctaagcactttatgcatactgatcatttaatctttacaacgaccctacgagttaggggacactattattacccccatgtggcgggtaatgaaattgcggccttgagaggatcaggctcaggagggggctcagatcactcctggaggctactggtggtttgatttggctagtgtttccaaatgtctaccttgctgcccaggggcatatgtttctccactcctgtgaacatccccctaccccagactgctttcaactgtaagctcttggccctgatggttaagttttctctttcttttcctttctttcttttttttttttcttttttttttttttgagacagaagtttgctcctgttgcccaggctgtagtgcaatggcatgatcttggctcactgcaaccaccacctcccaggttcaagcgattcttctgcctcagcctcccgagtagttgggattacaagcatgcgccaccatgctcagttaattttgtatttttagtagagacggggtttctccatgttggtcaggctggcctcgaactctggacctcaggtgatctgccccgctcggcctcccaaggtgctggaattaccggcgtgagccaccgcacctggcctgatgtttgagttttctcaccagttcccctgtgtggttggcatagtctggaggcagcaaaggggcctttggacccctggccttttggctggaatgttgccagagattcatcctccctacagtttttgaagtaggttcatcattcaggtctcctagagatggagggcccttggttaattcatgcttcattacatactgacagtatgttatcatagacagtatatttttggtaagcaaatggaatcactcatacctctctggcaaataacttaaaaaaaattttatctggtgaagactgtttaatatgtgtttttccttactccttagtgcttacaggtagaccagaaacttttcaagaaatcagaaaatgggggcattgaacagaattcaggactttcttggagaggggaagtccacagatattccccaaactttctgatgtcttcgatcctcctacaccgtgcttcctattggaatagcgtgaagcaaaaatgaggtttcagtatcatgatttcctgcttcccttccagagagccataaatgactggttaaagatcaaaggcaggcgtaaggagaagggaaagggccccaagcacccataaacgggataattgttctttggttaaaggaaagtgaaccattcttcctgtaactgtttcagtgggcagcctgtttccatcaggctttatggaccacatcaggattcaggattctttacagggcagggccaggaatttaaccccagtgataacaatgcctttgggtggccctggtaggcctgaagggattgggagggaaggaggaaagagacagaaagaaaatggggagagaatagcaattacaacaatgagagagaattggataagggagaaaaagaaatgatcaaaaataaaaggacagaaaaaggttctactgaagtagagtcattgactgcattgggatacttgaaaattatttagtgcttattgcttagttcgagttcaatctgatttaaaaagtttatgagattctggatgagttgggaagagctattttgcactttgacttgatagtgatgagtgcccagaaacgttgagatgtgggccccaaaaggaaatgattctacttatgaaaaagaaacatcccgttgttttgtttcataggtcttaaccttatttttaatactctcaacatacctgtatagaatgtttatagatttttctctctaaaatttctcatatgattccagtacattatttttagttttaagttgaattctgagggtagcaccctaggatttttgcctcattttgaacctggaagtctacttgattgagcagataaatagggggaaataggaattcatccttagtgaatgaatgtgtagacagctgatatttaaaatttagctttaggttcatgtcatatgctaactctagaaaatggagcctggcaaagttttggattctgtctgctaagagggttctgggctcaaaggtccctgctgtcagtctgtagtctgaaaaggatacgtgttgccatgtaaactggctgggcagtatggattgccctctggggatcctgactcattggctctaattcacgtggtgcatgtcaatcagctgctccctgtggttgtggccagagggccgccataatttctccgggtcaatggtagaaaattgattttcttatgtatactgctaccagaaaatgaaacatttgctttccatgtaatgcaatattttatctgtacctggtttggttcaggagtcaatgtatatacatgcttaaatgaaaacaactcttcgtcttcccctgtcactttttattgtgaaaattttcatacatgaaaaaaaagtaaaagaataatacaaggaacatctctatcccctccaccgacattcagctattattaacattttgccatgtttgctgcttcatattttgatctaattatatgtccaaatatatatatatatatatatatatatatatatatatatatttttttttttttttttttgtagacggagtctcactctgtagcgcaggctggagtgcagtggctcaatttcagttcactgcaagctctgcctcctgggttcatgccattctgctgcctcagcctcccgagtagctgggactaggggcgcccgccaccaagcccggctaattttttgtattttttagtagagatagggtttcaccatgttagctaggatggtctcgatctcctgaccttgtgatccacccgcctcagcctcccaaagtgctgagattacaggcatgagccaccgcgcccggccactgttgagccatttttccatttcatacatcaagttggtttcatacatcgtgacatttcatccctagaaactacgtcatgcatgcactaagactaaggacattttcttcaagaatcatagagcttttattacacttaagaaaattaacaaatgcattattataacatcttatatcctgtctaattttacatttcccccattgtcctaagaatgttctttacagttttttttaaaagccaggatccaatcagcgctcatactttacatttagctgttatgaaaatgacaacttttcttagctattagagattcaatatcagttattcaagttctgctattatttctactgatttacagaatctctcacagttttcaagaaaagggcttaagtagcatttcttatgaaaaaacatccataattaaatgaagaacctttaaaataaatattaagaatatgcttaagaattggaaaccatgagcatagacatttggaattattgtaagaaaacataaagatttctcattttaatcgctacctgagggcattctttaatggaatgaagtagtgagtgcttcttcagtttaaatatgttgcttgtttatattctcatgtgtttagagaagaaacaagtattctgtttgatttcatgcaaaggagaacatgtataaaatataatttacatgatatttaaattttgatcttttgatagaacgatcaaagtatagtacacactagatgtaagattgggcgtaatacccattttgctcctaacgcagcagtgcacactattaaaatatttaaaaacaaactggtgtacttgagtgcgtgccatgttttcataagcttttatgtttcataagcaggcaatggattctttagcacatttgggatttttttcaccatggaacttgcaaagaaatgaggactaggcaaaattgttatcactaagaggtgccgagaaaataacacttgatgattagacaaaaaacatagctaatatttctatgtgaatttatatgccaagctaaactataaacattttgctacccagcaagccacacaatgagtataaaccctaagaccatttgtcaaataaattatttaatttgttgtgtgtataagtcaaaattgcatttactatgtctttttaaaatatacgtcggttcttaaaatttcttgagaggtattaccacttagaagtagcattgccaagactgaccagctaatgtgttctcaccaaatgtcaagttatattaggtctggggtgccaccaaggaacgacgcaatagtttaacatgaccttgccaataatttccccagaacattatttcggctgaacattattcacagacatatttttgggctgaacatttcctctgacctgcctacatttactataccttgtatcttagtcaaatgtatctttaattatggggctaaaagaacagaagtatccagtgaagtatctttagtgatccaagtaagattccctctcatcaaagagtttcacttaacatggtttccgaagactttaaaaaataaaacagcaggcgctgagtgttgtgtttactttcggtctgcctgtgttcacattccctctcgtgaatatttattgactttctaccgcctgcaagaggctgggctgggtgcatctcgtgacgagtcacccagaacggtcagcacagttctgccggcccctgttgagtgtgattatcgaggccagtgctccgctgcctctcacgtaccatttcgctgctggtcactcctcattagtgcctttcctaagggtaatcagaggacacagaaggaaattaaattgaaacctgagagtattcccaccatctattttccttatctgtagttgggcctcctgaatttggttctagaacactccaaggacttgagttatctcaaggagattgatgaaattcctgctatgaagttagctttgattacaaaacaatgtgtcacaaagtacaacatgttctaattggagttttggagctagatggagctggagttgaatcctagctccatcctggcctactgagcaagtctctcgattgccaagcatcagtttctccatctgtcaaatgggcacagtaatactaaacccacagggctgtatgagaagtaacaaaacaacactaggataggccgtagcctggtgtctggcacatggcagacctccaggaaacagtagtgtccgtctttcctcattggtacttttttgaggggtgaagaaagagtggggaagagagaagaggaagtacatcaataaatgataagaactcactcacacctattaaaaggtttataccgaagtttttcgcactatgggctgctacccattagagagttgtaaccagaattgaaagaaggaagaaaagagaatgagaagagaaaacatcagaattcatttaagtactaaaaagagaattctttcggcaaacttttttttcagtgatacgggtacatatgtgtactggatcatgatgtagaaaatttttttttcttttcttttttttttttttttttttttttttgagacacagtctcgctctgtcgcccaggctggagtgcagtggcttgatctcggctcactgcaagctccgcctcccggattgacgccattctcctgcctcagcctccggagtagctgggacttcaggcgcccgccaccaggcccggctaattttttgtatttttagtagagacggggtttcaccatgttagccaggatgttctcgatctcctgacctcgtgatcctcccacatcggcctcccaatagaaaatattttttattggaagtggtgattgaaagatatgagaaacactagtttagttccatattgttaatgctccatacatcagagagcactgaaagttacctgtaacgtacaatgacatgcaataagtttgtgaatcataacagccacttttctgtttgtgcccatcacacccgaccccacacctttccctggggttcagtccaacacagtcaccacataggtctcagctcagcagtaagagcccacaccaccctgtgcaggaaccatgagcttatctgtctgtatcctccaagggatctgtcccatgtatctgcatatgcccccaagcctggcacgtagacgagattgggcacgtccagggtggtatggccgtagatgagcctggcatttagaaggtacttgataatattagtcacctcagggactgcgaggactgtgtgtagcctctgctcttagcccctagtttaggataaggcccaggctagtttcttttgggaaggcagacagagcttgcatgatccagaagaactggattaggatgaggctttgaggagcctgatctgtggggactggtgactagggttcattaagcctgaattccaagggataataaagtatcctgctgttgggatagtctcacgttttctgatctgtaatgaacgtagtgggaatttactttcactacttagaggtctggtttcaaaatgtgacatctttctaaaaacatttcttatgaatgctcatttatttccttctgggttaaattgtaatctgtacaatgggaaaataattcccacctaccagggactttatagagattaaatggggaaatgtttgtaagcttgagcccatcaaataacacttcaggacccaaatgtcagtccactcttttacttataatagtgaatggaaaattgttgtctcctatttctcccttaaagacaagagaaaaggtcacattgttaaaagtgactgtttctatggaaggatattgtggcatgttagagttctagttagcatccactgcaatgtgccctgcctgactttttagttacatacctcatggaaaaaattaaacctttgccccttgacacagtatctgacgtgacaggatgacagttttcttttttctttttgggttataattggatgattgaaaacaaaggaaggagatactttgagccaataaaaaggttccagtgtatatacaaaatgatctggttctcagtcaccgtattggaccgttggcaacatctaatgcattttggtatcttttaagtcattgtagggaatcatatttacaaaccacactctgggttctctgtcccatttgcaatgtttctgaaaggtgcctttgatgtgtaagttctgcctgtttatgatgatgtatttattatggaatgatgtcagattagaaaagattttgagatgaagctcagcagatctctcctcaatcatggtgaaatgcaaggttaatgcaagatatagatatgtgtgcttaaaggtatattgattatgtgtcaagggcctgtgcgagaggacatttcagtgggtcctctttaaatgttttcagacgagtgctttacagagtggttcctaggacatcagggagtaagagagatacagacatagccatgcatgacacccttgtcctcgagggcttagaactcctttaagtctctagaggaaggagaaatcaattacgtttctgttctgtttcagttcttatagttagtgttactaggaagaccttggcttttagccttaggagaccttggctttaccgtggaatctagaataatatttatgagctgagtacccagaatgttttaggaactaagtaaaatgattattattgatttcttccatgctcaggttggctatttgaattcagcaaagtcctgctaatgggtctaacagttcttcaggcctctctggtcgaacctagatagggcacagacctaaccatgaaaacaggaagttgtgagaaggaccaggtttaagtggcaatgattgtttcttccatcactggaaatcccgtattaattttatttatagttagctgtgcatttttcttagcagagtcttggaggatgttgcttcgcgtttgacttctgtttactttttcacactctctgttgactcattcttattgaattctaggaggagccagaagagaactagttcgatgtgtgcattcttgaatagcatctgatcaataaccagactggtggtctgttgtacttctgcatcagctcagcggtctaaaaagccatttggataaaaatctttgattagcactctgagactcattatccatcaaaggcaggtgcaaccaaacacagagaacttggagaaataggatgactgaactcagccaagggtctatagatctgggatgtggagcgggagttagaaggttgcctgccaatgttggatttggtttttaaatatgactctgtatccattaattgatccagagtgtgaattccagcaaattcaggcaatgcgtgggagtggcaagaacactgcagcaaacgcatacctcagtgcagaaagacgtgccctataagtagatgtatttttgatggcctgtttggataacctgcactgtcttctcctgcctactctccccactatctgcccagtctcctgagcttcatgcatttcctgccaccacagttattttctgaaaacttggttctgagtatactactctcttgctcaaacacctgtgatggctccctattgcttataggaaaaaaaactgggtttctagcagactttcagagcctttcacaatctaccttcttctatccacttccatttaacctccttctctccagccacactgggctgctagctttgaatccttcaccaaatttcttaacctaagcctcagtatcctcatctgtaaaatgggtataatagactctatctcttaggattaaggattcattggaatatccaatctaataatgagcttagcagagtttcaggcacatggtaaggaattaataaaatttagatatatttgtaattttcctcattattaactagacacagtgatttgaccctttactcatgctgttcttatgccctctggcattggagtgactttgatccttaaggcacatctgtaaggctatgcctacctttgtgaagatattctgaatctctcaatcaattactgaactctttctttgtccatccattgtactttttatgcctcaattatatcacctatcaaagagcctgctttgtatgatggtcgtgtttgtcttcccatttgagttggtttcctgctgaaattggaccatagatattctcagcctggagtgggaggtgagttgggataggcgaggtcaagtcagcctgcaagagctttgctccttgaagggactactttactttttaaagagcaagtgtgtaaggaattgagaatgggtgttacaataccgcaatgcaattctgatgccaaccatgtggagttagcatcaactctgcaaatgaagggcacagatcccaacaaatttgctctcacttcaagcccaggagtccctaggtcacctacagtttggaccaactggctgcaaatttgagagttcccacgaccccctcagatttgataattagctggaacaattcacagggctcaggacagtgctctacttaagatgattgttttagcataacagatacaaatcaagaccagccagatgaagagacacttagggcaaagtttgagaggatcctggatatggggcttccctgtccttgctctgtgggatcaatatgtgttttcttcctggcacattggtgcaatcatcaaccagggatctccaccaatctttggtatccagagtttttattggggtttcattatgtaggcatgattgattgactcattggtgatgtgattgttcaatctccagccccctctcttccctggaaaaggtcagctgatctcatccggctcaaagccccaaacctctaatcacagagttggtttttctggtgcactgagccaccttgatcacatccccttagatatggtccaaggagctcatgaataacaaagacattccaattacttgggaaatttcaagtatttagagtatgcctcccaggaaccagggacaaaggccattcaaattctttattatacaacaggcatgcttcacactgtcgccatcaaagctacctttgatgggttgcctctttacatcctgagccttcctattccatcaggacatgaatgagggcctaaaatccaccatccccagtcagtcaatagaagttggggaagattagaaatagtttgctgcctgtgaacaggaacagggggtggggggtcactaattatgggcggattcttaatataactctctagattttgtttttattgatacacgagtctgtcctattggcaaattacattcttgaggtcaggaatggtctaattgcctttgtctacaagcacacgtgctgtgtgctcagaaattgtccctctgttggaacagattgcccatctagctttgttgggggcatggtgagttcttttggctgtctgaatgatacagcttagccttattctaggcatccccagccaagaaagctgactcaatgagaaggaatagaggacgagtatggtggctcaagactgtaatcccagcactgtgggaggctgaagcaggagaatcacttgaggtcaggagttcaagaccagcctgggcaacatagcaagaccctgtctctaataaaaaataacaaaaaataaaaataaaaataaaaaagaagcaatagacatatctttctataaggatctgtgtggcgatcctagatgttgctggccatgcttggactgataatgcacatgaacagtagcaaacacttcctctgtgtaggtgaaatattgaaatttgcagctggattacgggtcactgacatgcaatggaacaaatgatgacaagaataatgtctacaaaggtagtttataaaaatcactttgttatgactctgtttttcaaagtcctaggagtgaaccatgtgtttgagacatcagaccatatacacatttacttgcatatcatgttttttttttttttccccctggaaataagtttgatggcttcatttcctgaaactaaatttaatcagggattaatggtcaattcctgatgaataaaaggtcttaacaggctcttgtggaagaatcttcttttctcaagtgatttttcttcaatgttctgccttttctcccacatttccagaactttaaaaataactctgtaggatcagtgcttctcccccaacccaccctccccaaccccactatctctccgtttctctttctctctatttgaagtcttttctgttgccagtgacgtagttctctgattctcttaacattaaggggaattctatttaaaaatttctagatgcttaaggcacgtgataattaagggttattcctatcaggaatagaaacaccatattagaacagttcttcctcagaggctactaaagaaagaaaattctgtttagagggtttgcctctgtggtctttttttaaaacagcagttatgtaatgtcaggtttaattggctgggagtcaggaagctggcttatttgtgcgcctcttgtgtcatatatacctgcagggctgagtggcccgtaaaaagcactcaagatttgcacacgggggctgctgcccaggaagtgtcctgcagaatggcagtttggcagacgttgaaagaaaagcatattagttttttttttttctttatacagtgatgagtatataacagggactgaataaacatgtgttgattgactgtaaaagaacctttactctgaatgggagacagcagtcgctgatctgatagcaagcttcccaagtctggcttctttctctgggtctatactggtgggtcaggaacaattgttaccgaggatttaaaaattaattccctagcaggagaaaacaggtggtaacataaaagaagtccctgaatggaggaaggatcaagtaattctcagaagagaccagcaggggaatatttatgacctcacctgtctgtaccaatgcatagccacattatgagatacgtaagatccaggagttttgccaacgtgggatggggacaggctgatgattaaattgtgacagtggagaggcttggtatgctaaaagagaaacatgtctaggaggtgaatccatgaatagaaagaatcttgaaggtgaaaagatgatggagaacatttgagtgagaaggaaaagaagggaaacaggtggccccgctgcatggcagaccatgtgcctcttgtccagattggaaatgtcatggaggctttttcaatgagttatctgctgaaggtttaagagagaataccagttggtttcttgctttgcttttgtggacaacgtcactgctttcaagctgctttgcgcttaatttggaaaagaattggtcgatggggtagcagttgtgaggactttagaacacgtagtctctgttatgttgaagttcaggagagcaaaagaaggagtcacaccacacctagccttttaagaaaaccttcaaacggtgtaggggaagaaggaaaggctgtgcttgttcaagaaatcttaggttctcagaaactctaagataaacgatgtgtgccatacccctgtgactggtctagtcattagctcacagttagcttttaataaagatttgctgaacaaacagaagaaggaataagaaaaaaaggtggctcaagtgagatagaagactttgaaaaataaaatcctgattgaaaaagtgttaattatttcagagagagaaagggggaatacatctttaaaaaaagggtggaggaaaagcatcataggacataccttgggagctttctaagctcagattagcctaacacacagtttaaaagatggatcactgagtgttcaaagatggcagacacagtaagaatgggatcagaaaagctcaaaaccatggcttgtgacaattctaaagacaaagtgggtttcaaaagcacttatattctaagaaaaaagtggaaccctggcttggggaggataattgtgataataaacgatgacagaaaaaaatcctatttagctttcatgcaattcctatttagcttttatcctttcaactgagaagaacagatttacaactagaaaagatccaaaacgtcattaagaaattaaagtaaaaattaggagagccagtagtcagacatcaagtcgttttgcgttggattaaggaaattggaatctgtccatccagagggtggcatcttagggacctgagaaaaccctgtagatgtggtcctggaactgaaacactggaatcatgtcccttagcagtgagagcggatgtggtgggggagtgaagggaccattcccttctggggctgacgttgagttactttgcctcaccatccctcggtttcctcacctacaaaatggtgatgttgtctcagttatcccatctgcaaaatgggcattctgtgtctcagttgctgataataatagtatttgctacctcttctggttactgcaaggataaataagataatctatgtaaatagttgacatagagtagacactgtataaatgttggctattattactattgcctattctctttgagaaattgtcagcaaaagaaagctttggggatgagaaaacatcccaagttttagaaaggggaagagacagattgtagaaattacagcctaattaatgtgacattaattcctggcaaaatcctcacatggatgagtgcagaatggtttgtaaagactttaaaataaaaagtcctcataggttctgtcatagtttgctaggcttgctgtgacaaagtaccataaacggggtgtcttaaataacagacatttgttgtctcacagttctagagactaaaagtccgaaatctaagtgtctgtagggttggtttcttctggggcctgtgagggaagactctgtttcaggcccctgtccttggcttatgttgaatagatggctagccgtcttctccctgtgtcttcacatcaacttcccttcatgtgtgtctgtgtcctaatctcgttttctaaggacaccagccatcttgtattagggcccacacctatgacctcattctcacttgattacctcagcaaagaccctatctccaaataggtcacattccgaggtctgtggggttaggactctaacacactttttggactccaatacatatacaattcaactccaacaggttcactaagaaaagtcaagcagagcaaaattaactgtgtttttgatgctagagaagaaaggaaatatatacacagtgaactgaagaattttataaaacaaattcaatgctgtcaatttttttttattttttgagatggaatcttgctctgtcacccaggctagagtacagtagcaccatctcggctcactgcagcctctgcttcccaggctcaagtgatcctcccacctcagcctcctgagtagctgggactttcaggcacgtgccaccatacccagctaattttttgtatttttggtagagacgggtttcaccatgttgcccaggctggtcttgaactcctgatctcacgtgatccacccacctcggcctcccaaagtgctgggattacagacatgagcctctgcacctggcttaaatgctgttaattttttgtatatcaatgacacctcaataaagcttataaaagatcagtgttaaaaaaaaaagtgaaggaataatggagactttttctgaattacgagttgaccacagtgtctgtttcttcctttgacatgcatatctttgtgatttcactaatattttcaaggagtaataaccttctcttctttcacccaggacctttactttgtgacattatgtgctttgtaagcttgtaaaacaattagaaaattgttctctgatagattgttcttgcttgtaggagaatggtattgaaatattcataaggaaatgaatttcagtttcaaatggcaagaagaaatatggtttaaatttttatagaaaatgacatagttcttgttttattttaaaaagaagggggaaaaactcatgattgtgaccttggctgtagttcaatgtagagattctagtgtgaagatttataatcttaatattcctacgatttaggatttatatttcaatttcagaatttaattattaattttctcatgaaagtttctcagatagcttcactttcttaaaacttcttttattattttattaagcaatgaaggattgtatctgtatttcaagagtgagtgaaatagacttttgtaattgccattttttatatataagtaatgggctcctaaaaaaaaaaagcacgaaggcagcatagttatgtcctgtgataagaaatgggttggtcttgctttgtttccagtagacatgctccctggttagcctattctcccaggtgaactttattacctgatagaaatcttatccatcaattgaattaatgtgtgttttgaaaacaccattcttcttccatgtttgctcctgactttgaaaacgaatcccaaacacactgctctcttttcctcctcataatcagatcctagctttcaatgcctcctaaatactgttgagttaattttttgataactctttgtccatttgtacaaaagcacatttgtacttttttgccccgtgcttacaaccacaccaaaaagatgccaaatggaaaactctcctggtctttaaagaaagggcaaagctacttctcgcaaattacatgaatagaattcctcctgtcccccaataaatgaatgccagcagttttttctttccttggagtttctactgattctttctattttaccacttgagtggccagaaattcagcacttgtggtgtgatggatgtttttaacttttctatgaaccgttgttttgaaatatggggtctgggccctgctggagactgtagggctgttcccaatattgcttttgagcggtggcaataatcagtaggtgggggccaactccacctcttggggcctctgttcttgtcatgcagtgggcgttaatctctgcagaggaattgattgtgaggaggaaaagagaaaatggataattataaagaactgggcacagctcaataagtggaaacacgaatgaccatgtgatagtgcttttccaacgcacctcccttgcccagtcagttttctctctggaaccaggtaatgttttccctatttcactcttctggtcttttcaggtgtgtcaattgtttgagctgtagcaatgcagtgattaccagtgattacttgggttttgaatgtgagtttgaaagttgaaatgttaccttattataggcacagtactcaagatttccgaagtacttatgtataaagtgaaatgaatcagacacagaaagagaaacactgtatgttatcacttatctgtgggatctaaaaatccaaacagctggactcatggagctagagagtaaaaggatggttaccagaagctgggaaggttagtgggagggtggtgaggaggtggggatgttaatgggtaccaaaaaaatagttagaatgaataagacctggtatttgatagcacaacaaggtgattatagtcaataataatttaattgtacatttaaaaataactaatagaatataattggattgtttgtaactcaaaggatagatgcttgaggggatggataccccattttccatgatgtgattactaaaaaatttttttgtgtgtgtgagggagtcttgctctgtcgccgaggctggagtgcagtggcgagatctcagctcactgcaacctctgcctcctgggttcaagcaattctcctccctcagcctctggagtagctgggattacaggtgtgcaccatcacccctggctaatttttgtatttgtagtagatatggggtttcaccatgttggccaggctggtctcgaactcctgacctcgtgatccacccgcctcggcctcccaaagtgctgggattacaggcgtgagccactacgcccagcctatgatgtgattattatgcattgtatgcctgtatcaaaacatctcatgtgccccacaagtatatacacctactatacacccacaaaggttaaaataaaaaattcaaaaagtacccctgtatatatttcaaattggaatgcattttcaaattattttagattttgtgtaagatttggatttggagtaagagttaataaaggcaataaagagattccaggctgtgaagatttattttacaatgttgataattgaggaaagtgcacatccagcatctctttagcattttggataatgtgtagagtttgtgctgctggttttgagtgctgtgctacctttctcatattctgtttcatattgtgaatttctaaacacaggtgttattgagacccacgagcacaaagtcatgaaaatttaatgttatagcttgtttacattgtggctcacttttttttttttttttgaagcagagtctcactctgtcactcaggatggagtgcagtggcgcgatttcagctcattgcaacctccacctcccaggttcaagtgattctcctgcctcagcctcccgagtagctgggactacaggcacatgccaccatgcttggctaatttttgtatttttagtagagagagggtttcaccatgttgatcaggttggtctcgaactcctgacctcaggtgatcttcctgcttcggccttccaaagtgctggggttacagatgtgagccactgtgcccagccagtggctcacttttaaatatgactttagtgtttgctttaaagacaatttattctctgtatggtattaataatatgagaagttcctttctgaactggagaatcattctctttatgattaagctgatttttaggaaacagtttcccaaaaacactgaatcaggtggaatagatttctgaaaaatatgtatatcatgtctgtgttcattatgaacttttctattttgcccattctattttgttcatgtggtcttatttcattttgcatcatttaacaaatataacgaggtcctacatcttaacttttaagatgtaaagacttacgtttatttccgtatatacttttattttaagaacttaatttatggccgggcacggtggctcacgcctgtaaccccagcactttgggaggctgaggagggaggatcacgaggtcaggagttcgagaccagcctgaccaacatggtgaaaccccgtctgtactgaaaatacaaaaattagctggttgtggtggtgtgcatctgtaatcccagctactcaggagattcacttgaaccctcggggtggaggttgcagtgagctgagattgcatcattgtacttcagcctgggagatacagtgagactccgtctcaaaattaatacatatataatatatatatttgttttaatatatataaaaaattagccaggtgtagtggtgggcacctgtaatcccagctattcaggaggctgaggaggctgaggctggagaatcacttgaacccgggaggcggaggttgcagtgagctgagatctcaccattgcactccagcctggatgacagagcaaaactccatcttaaaaaaaaattaatttataatacaagggcctttgcagccctgctgtatagtgtgggcattaagagccagacttatttctttttgacctctagatccacatggggaatcacttcatctctccaacctcaatttcattatctgtgaaatgggagataatattgaataatagcatctactgccaagagttgttgagaggtttacatgagataatgcatataaactgcctgacccataaatattacctattttcacggtcattgcacatttgtgagctagaaggctcgtgatgtggggtggacaattttggcctaggagactggagtttctcagccagataaaatccaccaagtctgaaaagggaggttgagaccaaggagaccaagactttggttctaagtacataaggtggtgctggttttctatggggttattctattattcatgttgctacaaacaaggaaattgatgtacagttgtttttttcaaggtcactctttattttagaagaataaagaaggaaaataatgcagtcattggatttctggactacagcttgactcattagtctttcttttctctccaaacagaaagttaaattactgttctgaggttcttaaattcagagtggagtttgtgcttgaaccaagtataatattacttgatgtacaattgggcagaatagttagaagtttggatgaaattttgtcctcttcctgtttctttttggcttttgttgctctggattttttttttttcttttttcttggacagggtcttgctctgtttcctaggctggagtgcagtagcataatcatagctcactgtaaccttgaactcctgggctcaggtgatcctcccacttcagtgtcctgcggatttatgctgaggtttgtcaatgttggatactattgtccttgtagcctgtgatgtgaggaatagcccaggggcattgtataactttgggaaatggaggtggggagatgctcattggatgcctttggaattcttgggactaacggatttaaaatattacactggcgtcactgtccttggggtccaatctatgagattcgttgatgatcattggaagtcaaggggtggccagacagatgagcacgaaagagaatccatcatggattgggctgtgttgggtggaagtaagctcagacttgactccgcctgcattcctcgcaggccctggaagacttgccttctctgtcccatttccggatagcggaaatgcactcactccttcatttattattcagtaatgatggaattcatttgttcatttacttaatattgaaagagcctgtcctatgaaccaggcgctgttctaagtacttggaatgtggcagtgagcaaagtagaggaaaattcctgccctcgtggagcttcttagtggaaagaggcagacaaaacccaaaaccaaacaatcagtaaaatattagaaacggatatgttctatagagaaaaatggagcaggggaagagataagtttcacttggttgggcagggggttggaggagagtttgcaattttgcataagttggtcagggaagtctagttttcacattggagcaaaacctggtataggcaagggaatagcaagggcacggagtgaacctggggcgtgtgggaaaagcaatccaggcaggaagcctgtgtggaaaggaggaaggggcctggggacggtggggaccctacaaggcctgtaaaccattacagggactgcagaatctgggcagctctgactaaggggggcagttgctggggtgttgagcagaggagtgacgtgatgtgtgatttaggttttaagttttttttcactttggctggttgtaaaaataaagcactaatgggctagaaaaggacttttgtgtgtgtgcgcttgtgctaaagggacagtcacatatttactgtaatgatatcccattgggtgtaaacaagagtgcattttgtcattaaaatgaaccaagagttatcatgaagccatggtccttgagggagttggaccccctggaagtttcaccacatgagtggtgacgcaggaggattctgtcatcatcagtgacaaagtcatgactgttgactgaagcagggtgaattacatggtgtgcgttgctatatgtgcaaagacatatcttttgtttcctgaatataattttggcctagattgctttaaatggaacttggaaaaatcctgcagaagaatcgagtcttgtttatttctccaaaaatgacttcagttcctttctttgctctccctcatttcatccttcccgtctctgcctttcagtgatgctcagaggtcagggaattgccctaacaatctgtatatttctgagtggtggtcattaattttccttggcttggctgaggaaacattcctctcacctcttttgagcatcgagcaccaccttggtgtgaatgagttttgacaacggaaccttgttcttcagccagggttgaagaagttggtgaaattccacttcctattaattttcttgtacaatttggacacctaggaaaacatctgaagaaagttttcattttgtgagctcataataaatgccataacatggtgtgccatgctgttggcttcgggtgtgacttttgtacagaaggtgtgcaaagaatgattactataaagattaattaggaacatgtaatgattctgtcttttaaacttttgaaatatggaaatggatttacacagataataattctgaagttttcacatctcatttttatatttgccaaacaaccccacgagtttcttttcttggcagtgcaaatgtttggagatatattgtatgttcttcagcacatgtgacttcatgtttttcttcacatattgtagttgtgcaagcccgtggttggagcctcactgggtagactcccagccatcatttcagctttaattggttgtaaaatattagcaggaaggcaaagttattttacaccaaagtgacttttttgggaagtagcaaattaaattttatggtagcagctgttctgagcagaatttgtcagaaagttgatgagaagcgaaagcttccaaccgttcgatataaatccttagtttaaaaaagatgcaagccgcacataaatgaggctatggaagtagagaaaaatatttttggtccatattttatttatttattttgtaaataatttaaaagtgaggccttcgttatttcatacttcagtcttagtctttcaaaaataattgttgctctgattttgcaatgggagcctttatttagtttagaagtcaataataatatgctaaaaaaggaacataacttaagtagagaacctctctaaggggagagttctgagtggaaaaaacacaaactgtttttcctctgcttttaccccacagcaatcaacacagaagaattctgtgaccagatgtgtgagggattttcccacacataccaagcaagtgatcagttctgcagtggacatcagctgggtgtcctctaattcaattccaaccctatctacctggacatagcaccagatcccacaggttgagggctcagtcctacaagaccgcccccgtcacccacttccaatgccaatcgcaagctccagttggctttatctgtgcttgtgaccaacgggctattaatcagggttcccagaactctgtccttggattctgttaatttgctagagtggctcacagaactcagggagacccttgcttatgtttactggtttattagaaagacttacaggtcgggcgcgatggctcatgcctataatcccagcactttgggaagccaagagaggcggatcacttgaggtctggagtttgagacaagcctggccaacatggtgaaaccccgtatctactaaaaatataaaaattatctgggtgtggtggcaggcacctgtagtcccagctactcaggaggctgaggtgagagaatcgcttgaacccaggaggcggaggttgcagtgagctgagattgcaccactatactccagcttgggtgacagagacagactctgtctcaaaaagaaaaaaaaagaaagactattgcaaaggataccgacgacgaggtgcgtaaggtgaggaagggttacagagcttccctgccctcccctgctgcaccccctccaggaacagctgccccgaagttctcactacagtgttctcttgggcctttttgggacgcttcaccggataggtgtgattgaagcgtggacacccatggagaaatgtgattagacacagagggaatgatctaatcctaacagacgagtggggaaacccagccagtcccgtcctttcaggttcttcttgggctctctgtgcaggattccttcctcctgggtatggggcaggaccccttctgaaatgggggtcttgtgacccacagtcagacaatggacatcagagaatttctttatggaaaggtaggggaaggtgagagcatatttttagtttctatggcctgtcttggggagaaaaaggagcagacaaaaggaggacaggggccgggcgtggtggctcacacctgtaatcccagcactttgggaggctgaggcgggtgcatcacttaaggtcaggagattgagaccatcctggccaacatggtgaaaccctgtctctactacgaatacaaaaattagctgggcatggtggtatgtgcctgcagtctcagctactcgggaggctgaggcaggccaatcgcttccacgcaggaggtggaagttgcagtgagctgagatcacgccactgcactccagcccggcaacagagtgagactctgtctaaaaaacaaaaacaaaaacaaaaacaaaacaacaacgacaacaaaaaaggagggcaggataaaactctgcctgagaggttctgttttctgaggcctaaagaatcccaacattctaccacagggctgtctttcaccttcatcactgatgctattccaaagctgctttgggaaccacggaccaaagtccacatactttaacagaagagatacttattgtttcagtcacttaggaaataacaagcgtcctgggagtgatgagccatgaacgtggatggaaaccaatgtacatgtttcataatatcacaggagtatactggataaatcatttgagaagaagctgggacatttgcacgtgttattccctttctggaactttctcccaccacacatctttgtcttgttgatgactttttgtcctttaggcctcaactgtcaacagggatggtctggctagtgctctctactgtaaattcttctagccttgtatagttcttcttagcactcattttatatttatttgagtaattcttcatcctgtgaactccataagataacgaagagttccgttattttttctggacattattgtatcatcactgcctaaagacaatgcttggcatggtgataaatatctgtgattgataaatatttgtttcatgaaggaacctgtgagtgaattgaatttggttggcgacaggaaggccagtacaaagattcctgcctgcagcctcaagtccgaatgctgaaggggctgggtagctaaggtaaatgggtgaagcagactgtgaggaacatgagttgctctgggcaaccagatagaatgttctggacaggtgctcgcttggtggatgttctcttgttccttccgtggaggcggattcttcttactcagggatgtaggcttgaaccgtggtaaatatcaaggactccctgggaagaaaggacttatggagtagagaagactgaggaaacttacactactcttcattgaagtctttctggaatccacagcaatggtgactgaaagaggaaatcaggaggtaaagttagcctgcagtgggttgaggactgagtgggaagtgagaagggaaagccagtgaagggaggctcctcctttgagaggtttgtctaaaaaaaaaaaaaaaaaaaccggaggagaaacagggtcagagaagaattccagaaagatacaagggaggagagggactttctctgctgatgaggaccccttcttctgagaaactgggcgaaggttcctagtttttgaggtgaaaatggctaacgtgcaatgagaccttgttgagaggcaggaggaggtcccaggctcagagaggggagtgtgtgtggggttggggttttgctttggggaagatgtgcgtggatgtagtcctaaacgcatctccatttctactttttatcacagattttattaataggtgctgaagaaatattattggaaagatggaggcaaagctttccttggtttttgcttctgacttgaagagtcactagaagcctcaggcccttcagaaatcttgagtgggaagaggcgttatggcagggaggaccttgtgaacccgtggaaatcaagaagccattgattttctgtgcagaattctgcattgactaaaaccctaaggcctatctcccagagcttcgacagctgtttagtcagataattgtgtccgaattgattatgaaaataatagaccagccataaagcagcataaaatattatgaaactattccagaagttcagtaatatctttgggacctgctcatagcccaagttttgtgaatacttttgtagttaaaaaaaatttttactttaccagggcattgcaattcttttccatcagtgaatttcattctacagacttttcagagcatctcataatcagtcaacaaatctatttcaaatgtgtttgttactaagcaacggttgctaagagcttctgtaattaagatgaaagttccaaggtaacaatgcccaaacacagcaccattttcaccattttctgataatgcaggagtaggatggctaaaagtgaaagaagaatctactctatggaaagcatggcacctgaaatttctgaagatattggctgtcctctagcttatatgagagagagtgtttgtgctttactaatcaaccagtcatttttttcttgtgtggctgaaatgtacattccagacatgaacaggtagagtatgtgttgggggcaggtttatactgcatgggtgtgctgagacagggccacgtggtgatgtaaatgatgctgcctgacacgtgcagctgtaagaggggtgaacggagtaccctctgcatgaaataaacttcctttgcagttatcactgacctagattaagcagcgacgcaggcctgttctgtactttgtttaacaatgcacagtttctttttcttttggagatttgtaaaggaagactcaaatgaatttttccctattcatggtgcctggctcatagcgggcgcttaacaaatgctcctctttgccttcccactccattttgttccaggggcgaggagggggttagggtttccatggtgacctgttgttgaatgacctcctttcagacctgttgttagatgcccaatgggcccgagctgcggtccagagagccgagcctcacctaatggagggctttgctggtaaaagaagattcagtcagtccaaatcagcaagcaattactgagttactctccagctgccggagcccttggcatttccctacagggtttgcgtgcaggttagccttgttgcaggcagaatggatgtcagccaccaaagagtactgaccggtagatctgattctgttttggttccatactttatgtttgggatgttcggcaggtcataacctccttggattttaatttcctcatccttacagagtgcacaataacagccacttggctcatattgtagggttggcataagaatgagaggagatagattatgtaaagtgctatgaaaaggtgtatacatattcatttattcaacagatacttaccgagtggttcctaagtgtcaggcactattctagttccataatatagttcatgtcagaacaaatcaatagatctatttaatcctttttaatggcattttgatatcctataaaataggtgttccatcatttatttaaccattccccaattaatggacatttaaataaatagtgctgcattgaacagctttatacaaataactttggcatatgtgagaatatttctgtaggggagtactgaaagagattttgccaagccagaaggcttatatatttcatattttgttggccactatcaaacacaccaaagggcaatagcaacctactgtcccagacaaaatgtaagagaatacccatctttccctatcttgtgaatctaatctttccaattttaccagtttgctggatgaaaagtaatatctaatggttgtgttatttttggtttcttgttctatccacgagcatcttttattttatttttttgccatttttacttctgtggttagcctttttatctaccccttttttgtgcttggagagatatcttttttttttttttaatttgaaggggctttttatatacttgaacatgtttaatactttttcatttcattttatatactttttcattgagaggagagagcccatgctaaccactattttacagaggagatgagagacatatgacgtgaatagctagttacagtcacttggccttatatgatggggcttgggttggaacctggctcttcctattccaatctgcctttttttcttttttcattttttgagacagagtctcactctgtctcccaggctggagtgcagtgacatgatctcggctcattgcaacctccaactccccgggttcaagtgattctcgtgtctcagcctctgaggtagctgggattacaggcacgtgccaccacacctggcttatttttgtatttttagtccagacaaggttttgccaggttggccaggctggtcttgaactcctgactttgggtgattcccccacctcggcctcccaaagtgctgggattacaggcgtgagccacagcacccggccccattctgattttatttgagcaagagggggttatttgggaggctcaactggccaaggagggtgcgttaccttgtagggcgatttggatggttgaatgcagtaccagggaagccactgggttaaggaaggggaacggtgcccagcacaggtttcttctagtaccagcagccatccagccccatctgcaggtgttacctaatcctgggaaaaagtgaaggtaactgagggcctgagggcaatgactgtgtctttgttccttaggaggtggatacaaagacaaaggaggagtagagtgacagccccttggcagtgccacctttctgccctccaagggcacaaacagtgctgcagatgcctctcattacagagaccagagaacataactattgtcagtaatcacaaaatacttgaagcaaaaatccttctctccttgttggagttttcagtggtatcttattcgaataatcatcatttctttttttctgattgaataattaccattctccttttctgtgtaaaagagtaaacttgatataaagtttttctggaatggtcttattttaagctttttttttttcttttcttgtcttatcctgatctggcttgtgatgttttttgatggggctaagtcctagaatagaaaatctagatgtatttatttgttcgtaaaggctggaagcaaccttcagagctctctggttcaagtcacttattgaacacgtagggaatctaagatctggggaagtggggtggtttgccaaggcactcagttattccagattgaagactagaatttggggtcctcttcaactgttttgggacttctgattgggccattttatatctttctgatatttgtctatgttctcctttcttttaccttaggatttcttaccttgaaaatgagtctggttgtacttattgcattgaattgttgtgctaagtagttgataaagcacttttcacgtttgatttttttttttttttttttttttgagatgaagtttcactcttttcacccagctggagtgcagtggtgctatctcagctctctgcaacctccacgtcccgggttcaagctattctcctgcctcagcctcccaagtagctgggattacagacacccaccaccacgcccagctaatttttgtatttttaggagagacagggtttcgccatgttggccaggctgatctcaaacccctgacttcaagtgatccgcccaccttggcctcctaaagtgctgggattacaggtgtgagccactgggcctggcttcatgcttaaagtttaacctccctttgaacatgtttatgaaaactcctctttttctacattcacattatgcatataacatgtacttagttgacccttgttgaattaataaaaggataattgttaggtatttctatactttaatcacacatacccacacacacacacaccccacacacacttaagtctcaaattcaccactgtataactacctgaagattataaagtccagccatccccaacctttttggcaccagggacaggttttgtggtttccacagatgttgggggtggggggcaggaggatggtttcaggatgacactgtcccacctcagatcttcaggcattagttagattctcataaggagcacaactgggatccctcacacgcgcagttcatagcaggggccatgctcctgtgagactctaataccaccgctgatctcagaaggcagtagcagtaatgctcgccataccgtctgccgccctgggggttgggggcccctgatatagtctatctcctgttttcaggcatggagtatttgaaatattaaaagtaaatcatttttccatgattttaaatagagaaaaggatcccacaatttcccttagatgctcattttgatttttcataactgacgctgttggaaaacttctttgtcttgtttagtttgtttcacaggtggctgttgactcctgtgctcgcttgtttgcccaagtattctcttatacaccctgaatgggtagttttgccatggactgagtggtaaggtgatctggaacttctggggtggtgtcctgtggtgctgtcagagtaagccaagctggagtctgtgtggctgcagtacataggtggctcaggctgtgctagtagacagggctggtgcaacccagggtgaagtcataaatatttctaggctatttggttggtccatgtggtcatggtctctgagaaaggctggcatattttaagtcagatgtctgtgtattaggaataccaccaagagtgaatgcttaggaatagtgggttatattaccaaggagagtgctaagagaattgttgttcctacaagttttgccactgaatgaggtcttttgtcctattacagagagtgattcaaaaccctttaatcccggccaggctggagttgatgtttggataccaggggcagggcctgtcttctacctagaaggatatagtattatgtcaagaggaagattttctagaacaggagttctgctgaaggcgtgggaggtggagtgggagaataatcctggacctcaggcaccctatgggtagaaccttgggacaggtatttgccgtgaacatctcacatgctttgcatcagagcttcatccaaagggatgttatcaattttgggttcaaggcagaggaaagattaacatacttcagataacacactctgagattttctgacttttattaagaatgggaattttcccttttgttcattttattcaatcttgttctagtctcttagttttactttttcagcttttaaccatcttttttgtgtttctctgtcaatgggtgatttttgatgttcaagggtggcattaaataaacaacaacacttttactttaaatattagtttttcattgtttcaacttttattttgatgtaatattagacaaacagaaaagttgcaagaatatcatgaaaaattcttgtatgcttttttccaaattctccaaatggtcatattttgatacatttgttttatcctttttctctatatgctatttttttctcctgaaaccattgaggtaagtgcagataagatgtctcgttgcccctaaataatgcactgtgtatttcctaaaaacgaaggcattcccttacataaataccatataactttcaaaactgggaaattaacattgatactgtcatattatctaatctacagacctcgttcagatttcactaaatgaaacaataatgccatttttagcaaaagaaaatccaagatcatgcagtttattgtttcatgtctttttggtgtctttaatctgggacatttctttcttttctttcatatagtgagatttttgaagagcatagagcaggttttttttttttttgtcgaatacctcttgttttatatttatttgatgtctcctcatgattagattcagggtttccgttattgatgggaccaaaattgatattagcttttttttttaattttactttaagttctgggaaacatgtgcagaacatgcaggtttgttacctaggtatacatgcgccatggtggtttgctgcacctatcaacccaccatctaggttttaagccatgcatgcgttagatatttgtcctaatgctctccctccccttgccctccactccccgacaggcccccatgtgtgatgttcccctctctgtgtccatgtgttcccattgtaattcatattagttttaaattgatattagtttttaattagtattgatttattcaagttgaaaactatattttttcattgtgtgattttattttaccgtaaatgtcttgttattctatatataaatctagaaagtagagtaggaaataagaacaaatcatttatgggtgtttgctttaaatgatgcttgataaactcaggctggacagactatattcccattaatccattcaatttgtaacttaattacatcttcttaaacatttaaaattgtatttgtaaataaatatgtctaatcttctttttaatcactttaaatgcctgataaagcaaacctgaagaccttagcaaacactttcctaagtatttgaataattcttgcaaattaaaaatgaaatgtataaatacggtagattcctcattcttccagacattctaatattgtttgaaaacgctcatattttcactgtttactcaatcacatctaaaatcaattcaaatctggcacattttcaaagatatcagattctcaaccattccatacaccttatatattattattattttacatttattttgagacagagtctcgctctgtcgaccacgctgaagtgtagtggagcaatcttggctcactgcagcctccacctcccaggttcaagtgattctcgtgcctcagtctccagagtagctgggattacaggcacctgaaaccacgcctaatttttgtattttttttttttttttttttgttgagacagggtttcaacatgttggccgggctggtctcgaactcctggcctcaagtgatctgcctgcctcagcctcccaaagtgctgggattacaggcgtgagccaccagtgcctgaccatgttccatatactttaatccctaatgtacgaagattattctgagcttcacacaaagttattaatactgtggctttcatagacttcggcatttctatatttaattccgtaccttcccaaggttgccaagacaaatgtgcactgtggaaagcaggtctataatgggagttgggttgaggttaccatgctaataggtgcgacatgtgctaatacgtgcctcttatacaattgtttatctggcagagatttggggttgaggaaccatatgtccacattctttttggacagataaatccatttcatcattgctatgacaacatgaggctaaacctcatataatttctttgacaacagatagtggtccacacccttcagatgcgatggattttcaaccttggtctcctgggttgatatccttatgttcttctttcctctgatttgagtggacgtagggtatcctcatccaaattgtaaccgatttcccctcctgcttgattacattctgcatttcttttgctcttggcaggattatatcatcattttattctgtctgattggattttacattttctttcaaaacctttggccacaactccaaagcttcatgctaatgaaaatgcccttctctaatttcttcatgttactttgaattataggctttagagcttgacttagattcccagaaaaagttccactagtgctatgtaacttgattataaaaattcctaggccagccgtgactcttaacatctgagagctctgtgtacatattgtaactagagatgactgagcgtgttctcttttgttgttgaattgctttcaaacagatttgaaggctaaattacaaatgaacaatcaaagtaggaatagatcacgtataagaacatcatgaagtcatggatagtggctgttatttattacgatgtgctatttacttttggtaatttaatttaattttgcttacttagagtgtctggaatgatagtaatcgctctctgttttcttggcagatattctgtcccattaatctttttttttttttttttaaatagtttagtttggtgtcgttactaaaagtacatgttttggaatcagctgcacttgagttcaaaatggagttttgcagttttttagctgtgtgactctgggcaagttaccaaacctctcggagcctcctgtgggtaccttgcagggttgtcatgaggattaggctgattttggaacacataacatagcacctggagtatagtttttttaaaataatgtttattattcacacttcccatttttgtcgtgtttctgtcctcatccattgcttctggtcttcctcacctctcccgatgacattttattgaaccctgacccctctttttgtttctctaatagctgtgcattgcctctattcattatatatttcttctagcttgtaatcatggtagaggcaaagtggacagtccatttattataaagatttcttccctctgtctcctgggagagcccctcagttgtaccttctgggcttctttgtgttgagcttggtgggaatccataagccatcattccgctccacctcagaggccattccttggatgcatctgtttctccttgatcttggaaatttccagtggaacatgcacacattttgcagtgtttacggtgagttgggacagtgctgtccgttgtcccaataatataagactgttttggtttctactgttttcggaagccagattcatgctccctcctaccttgttctttagggttatagatatcattaccctctaggtggaggacttggcaaggaggagttgaccactgaccattggaaatctcgatacccaccattcgcagcatgctgggctcctctccatccacttccagttccttcctttcttcctttccattcccttcccttcccttcccttccctttcctttttttttttttcagggtcttgctctgtcacccaggctggagtgcagtggtgtgatcccagtctcccaggcttaagtgatacttctacctctgcctcccgagaagctgagatcacaagcacataccataatgctcagctggtttagttttattttttttgtagagatggcagaggggtctcactatgttgcccaggctggtttcaaactgctggcctgaagcaatccttctgcttcagcctcccaaagtgctgggattacagtcatgagccaccatgcctggctcacttccagtttcacttagcttaggttgtgccacctatcagaagtggccaaggaggtagtaacctcagtgaccaagaccttgagtggatttcaaagactgaaaacctaatggggcagcagtagccgtagtgttcttagacacggagcaggagcaaactggaataattctacagatgtctacttgcccagggcaaaaccagattggtcctgactgatgttttctcagtttttcagagttataaatgaacaccaaggctatacgaacagttaacaatgaagactaagcatgcaagaatagctgtggctaactgaataccgcagttgtttggatggatatttgttatatacagactcttataatgccaattactattaagtaccagatgccagatactttgaaaaaatatatttctttggattttaacaaccctttgagacaaatattctaattatctccacttttacaagtaaaaggttaaattcattgtccagagtcacatggccagtaagtgatagagtcaggactaagacccatatctacctaagaccaacgaccatgctttaatcacttccctgtagacaaatggcataaggaattttctaacaactaacttagtgggatttttccttgccaaattaagaaaatgctatgccagtcagggaagtcaccagaaagcactgatttaaagaagaacctatcaactccaaaaatattgtctctagatgtccattaattctaccaatccatgactcattgggggcaataagcaactcctccatccagagacgagtaagaagttatgtcagtcattttgctctagataggaattaatttacccagattgctttcctaacagcaaactgcaatgtactgtgtgaataaaatatttgctggtttgggaaggagaaagtggaggtggttttggaacatggagaccctttagagtagggtaggctttggcgagctttgtccagccgtagggtagaaagcatagaggaaggcaaaagggaacttggaaggctgaaataggacagggatacagaaggagaggtggggaagctccaaagacaagttcacctctctcctgcttttgctgactctgaggattcttgttggtgggtgatgagggtgagggtttgaaataagaagtaaaaagggctgggcatggtggcccatgcctgttatctcagccctttgggaggctgaggtgagaggatcgcttggacccagaagtttgaaactgcagcgagctgtgatggtgccactgcactccaggctgggcaagagagtgagaccctgtctttaaacaacaacaaaaaagtaggaaggagagcagtccttggatttcaacagtcgccagttgtatttggggctttcttaaaaatggagattttggaaatatattactagagaattggatccagcaagtgtggagtggactgaggaacttggattgtatcagtctcactaggtgatcttaatgcagatgccttgaggaccaaacttgtggaaagtttgggttagagtatcttccactgggctggtaggcaagtctatacccaacccagaatgtgatcctgtggcttctgtgaggttggggactccctggttgaacagctgaaggtgtttgaattgaagaagggcttcctctctttgagaaatgtgcttaatcaatccaggcaaagcttttcaagttccagaaagttctgcctcagggataggctgcctttttcttccttgcctcttagctaattaatttctggctccatctctcatcctggccgggtttgaggaggaagagctggatttccagctgcacggagagccaagaaaagtagggtgaccactgaaaataggaccttcagcactgaggctgggacagtcccagacccactgggatggtgagtcccctccctgtacagaagcccatgtggtgtagacccctcaccaattctactcagctacataaaggctgtgccatgatgtcccaggccgggggaatcactcactgagtagatttggtgcacccataggagctgtttcttttttctttagcagaaaagcgcttttcagtttagtttctttggcttgtttcctggagttgcaggaggctgattgttggcagcgtcacctggcctgagaagtaactcctcagtgcttcctttttgtcaaatattatgatgtcaagcatcattgccagattttttttttttttatctccactgaggctgtaactagcatgtaagttcactgagactagagaaattagatcttcaaacagccctttggaggatacggatggggaagtaccacacaaaggagttaagggaggacgggctgtcctgtcagcattggccctgtggcctcgccccacccagtggctttactattagcctagagagattgtactatattcttactgtattcagtttggaagaggaaaatgtgttttcttgaatgaggaatgtccccaaggtggagttcaggctgttttcctctcagcttgagctctgggatgaaatagggcctgttacacacaaagctctgtttgaactaaaatgactcacaagaggtgtccagaggaaatgaaagagtgtactggaacctggacaaacgttgccctcgatggagggtggagcgggtgaataatcgagctgaataatcccatgtctggttttttaaaaaggcataaaatattaagtgtgtgtgatgtgtgtacatagaccacaaacggattttgagaggaattcataagagaaattctgaaaactgttttaagcacggcagcattgcagagtagcgtaccttccaggggaagagaacaatgttcttacagatgaatgaatactgatgtttgtcagaactcagtaatcacccaagacgtgatttgatcccagaaggtttccccatctaattatattgcgcatctgctaatattaaaagtaatttgcaattgctaaacatacactaattgatggaatagttgtgagagtaggaaggaaaatgttctagaagctttctaactggatggacatcacttttgaatggaaacttgtccaaatccggaaaattagggatcgaccgtgtaaaaggtagtccttggaagaagacttaaagttgcttataatgtgggtttacatgattgaatagtgtcttctaaaatttaggaaacatatgcagaaaattctggaaacaaatgagactaagagaattaatcctgccctctgtctttagcattacaaaaggtttttaacactgttgctaaatgatctggaaacaaaaatactgtagaaaataagaatacattgtctttataaagcagctttgagtctaggagagtaggacatgacttaattcaactgtagtcttattttccagtgggatggaaaatttggcacctacttagattttttttttttttcttgagatggagtctcactctgttgcccaggctggagtgcaatggcacaagcttggctcactgcaacctctgcctcttgggttcaagtgattctcctgcctcagcctcctgagtagctgggactacaggcacgtgacaccatgcttggctaatttttatatttttagtagagaccaaatttcaccatgtaggcaggctgacctcgaactcctgacatccagtgatccgcctacctcagcctcccaaagtgctgggattacaggcgtaagtaagccactgtgcccggcccttttaagaatttgcctttggtaaatgtgtaggtctgtggaaaacaaaacagagattgacttatacacaggacaaagatgaccatcagcatcaagtggttcctaagctccttaaggttctcggatttgaggcagccacctggtagaatcagagatgtcatcatgacagccacatcacccaaccaaaccctacacggctattattttgagacataggtttccttggaaactattcccttaggattgatatgatgggatctttcctgataataacagctaatatgtactgggtgttcacaacgtgccatatgctgttctgagtgctttgccttatattcattcacataatccttccaactctatgaagattccctatgttttctcttcttagtttaagatggggaggatctgatacacagaaaagagaataacttgactcaaaggcacacagcctgtagaattaagatggaatctggctttgggacttgctcttcatcaaccccttatggactgccccacactgattggggaatcatagagaaattgtaacaggtcacatttcacccacagtaaggagccccctccgctaagcctggcctcccaagacacagtacattttccctttcgtgatttaactagtaatttcattaggttaaaaacatcatctccttttcttaccttgaagccaggacttctactgaggtaaatggtgtgagggctgcagcttcaagaatcaaattgaaagtgtcacaaaaagaaagctggtaaaagagtaaaattggactcccacctcacacacatacaaaattaactcaaaatgggctaaagacttaaatgtgaaagctaaaacactctaagaggaaaacagagtaaatctttgtgactttggattaggcagtggttttatatataatgccaaaaaacacatgcaataaaaggaaatacaaattagacttcatcaacatttaaaaacacctgtccttcaaggacactctcaagaaagtgtaaagactacccgtagaatgtaagaaaatatttgcagatcattcttctgataaagaactagtacccagaatctataaagaatggttacaactcagttattaaaagacaagtaacccaattaaaaataggcaacagatttgaatagacatttctcccaagaagattcacggtcaataaacacatgaaagaaggcctggtatcatcactctttagggaaatacaaatcaaaaccacaatgagacacttcataactcctagaatggacatagtgaaaaaggtggacaataacaaatgttggtgagaatgtggacaaaatggaactctcacacatcgcaggtgggagtgtaaaatggtgcagctactttagaaaatagcctagcatttcctcaaaatttaaacaaagaattaccatatgatccagtaattctacttcttggtatatatccaagggaattgaaaacatacatccatacaaaaccttgtacatgaatgttcacagaagcattatgcataacagctaaaaagtggaaacaacccaaatgtccactaattgacgagtagataaacaaagtatggcacatctatacaatggaacaccattcaccccttaaaaggagtgaagcactgatcatgctgttaatataacatgatgaatcctgaaaacattaagctagataaatcagacactaaaggccacatatgatatgattccatttatatgaaatgtgcaggacaggcaaatccatagaaacagaaagtaggttagcagttaccagaggttcttggagaatagggataatggggagtgattgctaatgagtactgagtttctttttggggtgatgaaaatgctctagatttatataatggttattattgcataactttgagaatatactaaaactgaattatacattttaaaaagataaattttatggtattatgattacatgtcaatgtaaatatatgcatacatatacaaaaataaaaaagaaagctgtatctgcctttttgcagaaagtaggaagcaaagttagcattgaccattcaaaaaatacaacagcaggaaacttttaccaatttcactttgggcacccaagggcactgggacccagctccttgccaaatgaacctttcattttcttatttttttcttctccttattccttttcccaaactttgtggttggaggaaataactagttcagcggggagaaaaaagatgctgcttctgtttcaatcttgaagcagtgttctatgtcatgacctgtcatacacaccagaggttctacatggatttgaaaacaataacatatggaaatgttgtctctttccacattgcttttattggttttctgcagtcctgtgcttttctccagctgggttgctttttgctttgattttgttacttctgtttgtttatttatttatttgtacagagaaaattatcacagtgagcagagtacaggcccactgagactcagctgtggaggatacaatatggtcaatttcggtctggttttggcattagggcaatgagggtgtcgtaagaatgagttaggaagtattccctctgctcttattctctgaaagagattgtagagaattggtataatttcttccttaaatgtctggtagacttcaccagtgaactaatctaggccttgtgctttctgttttcaaagattgttaatgattgatccaatttcttgaacagatatgggcttcttcagattgtctatttcctcttgtgtgagttttggcagattgtgtcttgcaaagaagcagtctatttcatcttggttaataaatgtgtgagcatagggttgtttgtagtattcttttattatccttttaatatctatggcatctgtaatgatggcccctctttcatttatgatattagtaatctgtgtctgctctctttttttcttaacctggctagaggcttattgattttattatcttttcaaaggaccagtttttggtttcattgacatttttttctgtatggagtccctgcttttcaattttattgttttctgctctaatttttattatttctttttttctgcttacattgtatttaattggctcttctttttccagtttcttaaagtggaaagttagattattaattttcaatcttttttcttttataataagtgcattcaatgttataaatttccttcagatcactgatttcgtggcatcccacaatttttgacaagttgtattttcattttcattcagttcaaaatattttataatttatcttgagatttattctttgaaccatgtgttatttagaagtgtgttatttaattctccatatatttcaggattttcctttttgttattgacttctagtttaatttcattgtgatctgagagaagacattgtatgatttctattattttaaatttgctaaggtgtatttaatgtggtctgtcttggtgaatgtctcatgtgggtttgaaaagagtgtgtattctgctgttgttgggtaaagtagtctatacatgtcaatgatatgctgttgattgatgctggtgttgaattcaactatgtccttgctgattttctgcctgctggatctgtctggtactgatagaggggtgttgaaatttccaactgtaagagtaaactcatctgcttctgcttgcagttttatcagtttttgctttgtgtaatttgatgctctgtcattaggtgcatacatgttaaagactgttatatcatcttggagaattgacccctttattattatgtaatggctttctttgtcccagatgactttccctgttttgaagttctaccctgttttgaaattaacatagctactcctgctttcttttggttagtgttatcatgatatctttttctccgttcatttactttaaatgtatatatgactttgtgtttaaaatgggtttcttgtagacaaaatatggttaggtcatatttttttgatccattctgaaaatttctgtctttcagttggtgcatttagatcactgatgttcaaagtgattattgatataattgggttaatatctgccgtatttattactattttaaattttttgcccttgttctttcgtttctctgtcttatactctttctaatttttacggttttaattgtgcattttatatgattctattttctctcctttcttagcatatccattatactgctttttaaagtattttttttttagtggttgccctgaggtttgcaatatacaggtaatccaaatcctctttcaaatagcactatgctacttcatgggtatatgagtaccttataataaaataattctaattcttctaattcctccctctcattcctttttgtcatccatttcacttatacaaaagcatatatgagtgtgcctgtacatagatatttatatacacatatatacatatgtaaaatatctctatataagcatatataattgaatacattgtttctattattattttgaacaaaattctgtaaggtcaattaagaataagaagccaggcatagtggcacatgcctgtattcctagccactcaaaaggctaaggtgggaggatggcttgagcccaggagtttgaggtcagagcctgggcaatattttattttttattaaaaaataaaataaaataaaataaaaaagttaaaaaattttttaattttacctctacttacgccttttaaaaaaatgtactttctttcttatgtagatccaagttcctgaccttcatcattttctttctttaaagagcttcttttaacatttcttgcaaggcaggtgtattggcaacaaattcctttaatttttgtttgtctgagaaagttgctatttctccctcacttctgaaggataatttagcagggtacagaattctagagtggtggcttccaaactgcttacatgtggaaccacacactgaaagttgtgcacctgtcattgtttctgaaactttgttgtttctagtttatatgcatgtggcttatatgatattcggctcttacttagcccactgacagccttaaaccctgtatgtccttctttcatgctgttcattgaagatggagattcaagtgggagtttgaggaccatcttttctggtttttttcaatgttatatttttatgctttgagtacattttcacttttgtcacacttttaaaaaatgtgttttaacaattacgggataagttgagagttgagatttggaaaaggtgttgatgatgttctcttgttggtcttccttttttttgcttttgttctctcgccctttccattctgaactttcttttctagacacccatttcttttatatctttaataattaaggatccttactgtggatttttcagctctgtatgtttacagattcttagttgtcctgtgtgttatctctttagattaaatttaatctgatacagtaatcaaggttatgtggctcagtgtgtcattccttccatatcacatgtgtaaagtgtacatgagtatttgaaatgctcttgggggtgtgtgtgtgacatttttggtctggagagcctcttctccttttttacatttaggttaactcacccagtgcagaaaacctcactgtaattactgtaatctataagattattatgtaatcctgttgatttgtttttgttgtttcaagaggaagaaaatgtctatggtcttcaaacatacatgtcttactaatggagggaagagagaaaacaagtgatggttggtgttgctcttttttaagaattaaaaaaatttactgtttgtgtttcctttgaatttggttataatgaaatgaatgtgtgctgggtaccataagagcagattctagtcccaaccgagtcattaacttcctttttacaaaaatatagatgccaaaatattttagtatgctttcctaacaaataagtacctagttgtatgtataaatacctacaacatcaatattgcaaaacattaataataattacttaattccttttaacacagttcatgttcacattttattggttatctctttcaattgcaaattgcaaagtcttttgttttgttttgttttagtagttgctcaagttaagagccaaattaagtacatttattcaattggcagctttgtctcttaaatatttttaaatttataatagtccccttccactcctttcccccttttaattccctttatttgttgcagaaatcaggtttttgccttatagcatgtcccacattctggattgggctgattgcttccttccagtatcatttaatttgtgcctctatccccatgtttcatataaactcatagatcaacaggcctgataatattctggctcaaattttcttttttttttttctaggcaagattgctgtatagttggtgctatgtactttccagtatatctcattgggagagacatagtatctgtctgtcccaacttcagtgagttaagattggtcagaagatttagctgtatacctggtccaccatttataaggttcctcatcagccatacattaccttaagtaatggtttttgcaatggacttctctagaagtcacaaactggaaattttttaattccatcattctttctgcatttagtagttggaattctttagtagggatcaatttttcatcattatgtatttgatatcttgaaatatagtttgaaaagaaaaagcaagatccatttgtcattattttctgttattgatccattttctgaataatgaattggggtcctggcagcctccctcggtggggatcaggaaattgttctctacttttttgggaagagggaaaggagtgggaggaacatcttatcaactcattataaaaccatggatgcgtttgagtgtattgaatcagttgcagtaattccttttgatattcatattgtcccatctttggccagtggagtttttttttttttttttttttttgatacagggtctccctctgtcacccaggctggagtgtagtggctcgatctctgctcactagaacttccccgccctgggttcaagcgattcccctgccttagcctcctgagtagctgggattacaggtgtgcaccaccatacctggctaattttcttttgtttttagtggagacagggtttcagcatgttggtcagggtggtctcaaagtcctgaccctcatgatccacccgcctcggcctcccaaagtgctgggattacaggcatgagccaccgcacctggcccagtggaggcttcttctaattggcttgtgtgtctctttgacactcttaatctgagccattaacttttgggcagcagtttcctcctctttaaataattgggttagttggtctttatgattccttttagttgtagcttcccttccagaaaaaaagatggtgtatgctaatattctacgactaaatctcttatgctaaaaatctactatttttgtttttttccctctttagagtccacacactgggtgaactaatgcatttgaaaatatggaatgcttttgtttctctctctctctgatctttgagctcctagttatgtgacactggcttgagaggggtccacactctaatctcagtatctaggtaagaaaccaaacaaagcaaacaatataaacatttctatacttaaggctgtaatgaggcttacaaaagaagtccctgattttgaagatggattggttctgaaacataaccagcaatgtagttgttattattccaaatgtggtattttttttcctttctatggggggtaccaggcttgaagaacggacagctgcactttatcccataggcctggtaaggcagaacggagagccgagaagggcctgaggcctcccaggaagctggttggggagaccagaaggctgcaaagctggccaacgcttgccaggtggctgcggagagtcagcttcagtctctacaagccgcccatccaggcagctcctgaaccagatccaggcaactgggccaagtccccaaggctgtctctgggaccagaaggtataaccaaagggaagcatggatttaaattccagggcataaaagaaaagttcaacgtatctaagaaggtgctgaaaatgacttttttgtaaatgtctgaaggacactgtcttataccataccatatacaataaaattttaaatgagcctgagttctgtttccatccgtgccctgtggagcacatgtgacttcaaaggcagctctgtagggtgcagggaggaaggagtgtgcttttatttctcattttggcacaaatccatcaaactatttttgatggctgggaaacaaaacttacattccctctaaattcattgcgtttggcagatccacctttgtttttctacagtgatggcttccacttcttcaacctttgcattcctcttactttgaggctttatttagcaggaaaaaaggcaagaatgatgctagatttcgagggaagccttaaatagcccagttcattaagtagtcccctccgcaacttcccatttcttctccccaacccccaatttaaaacagttgtttggaagacttttaaacctgaaacatccctttcataggagtcttatgatgtaaaaaggagctcgtggtttcatttcaatgtgatgggaccccttggtgatgagcaaatgtagcttcaacctaatgaatgtgcacagtggctgtgtgtgtgtgtgtgtgtgtgtatatgcatgtgtgcatgtgtgtgcgtgtgtgtgcctgtgagcttctagagactctggaattccattcatcataagaattagagatgttagcattgctttcagcaattctgtctcttctttgccgccataggactgttccttatggcttgcttttgagatgtttccttcatgatctgtgtttgtgctgccttgccccgtcacctctcaacactgcacttcagtggagactgatgcaggctgtgctgtttctatttctttttcttttttagagatgtagtcttgctctgcttcacagtctggagtacagtcctgtgatcgtaactcactgcagcctcaaacttctgggctcaaacatcctcctgcctcagtctcctgagtagctgggactacaggtgcatggcaccatgcctggccaatttttaaaacgtgtatttttggtaacaatggggtcttgctatgttgccgagattggtctcaaactcctagccttcaagcaatcctcccacctcagcctcccaaagtgctgcgattccagctatgacccactatgctcggccttgtttttatttcttttggactatttatttctgatcatttttattgctcttttccaaactctacattccccatcctctttgaaactttgaatcctgatgtggttgggtggtgggttctgcttaacttgttaaaagtgaccctaatgagcctgaagtggttggtttcattgcattagggtctttagacagctcagggagaaactgccactctgtaagcatttatcacctctactagggaaaaaaggcccaggcctgattataatggttcagcaagtggaggagaagatattgttagcttcaatgtctttggtattggatttcttttcgttcctgcattaataactcataatttattgatcttttccctaatctttgttagtgatgttgccttaaattataaaggacagtaatacaatattagtaacagttctatcaatatgctaaaagctttacctcctcctactccttcatttttaatcaaaataggaccttccctgaaggattgggttatgagtacaatgaatttatgttggtctagtaggcaatattatgatttaaaagcatttctcaatggccaagtagataaggaattatatgaaattctacaaataccaagaggtatttcagtggtttacaaatattgtctaccttctgtatgcataaaatgtcatagattggtgccagtgaacacacacacgtatctcaggtgaggattggcctcagagaaattactggtacattctagaagacaaaaattaaaaaaaaaaaagaacttacatgaaaaatttactaaataacataagcaaacttcaatgttagattggttggagatatacatatacatatacaaccaattggagattatgtatatttatataatatataaaattatatatgttgaagattttatgaatatattagtttgagatgatatatatatatatattctgatgatatatgatcatcagaattcagagaaggggaactatagactggatgaagttgaagatgccaatatgaaggggaaggaagaatttggataatttggatacaggggagccaggtggggagaagaagagttccaggcatgggaaataacatcagtaaattcaaaaagaaggactaagtggtggggatttatggaaggtcaggacgacttgagctcagggctctcgtgacataaaagacttagtgagctttttactgatatcttcagtgtatgaataaagttgatgataaagaactttaagaatatgcagttctctgtacagatatgaagtagcgattatcctcaaattatattgttgctagcttaagtagtttagtctatttgccaaaattgaaagaaaattatgaaatcacaagtacttatatttgcaaatacactggagtgtcccaaaatgacaaaaagcacagatttatctttgactttgtacagagtaagatctagaacagtgagaatcttggcacttgctggatttttaagagttgcatggatttattatatagacatcctttggtatcaacctcaaagggatagtatatgtgactttccaggccacctgtagaaggcagtcttcattgtccagggaaagtgttaagcatggatgaaatcccactgatatgagatatttcaaaaaaatttctggcttgttattagaaccagccaaaatgattttactgagtatcttctatgaccccagcagcctacaaggaaatatgtgggacccctgattcttgatcctacagaacttaggaagatgagagtattcactggaggaaaactaggaaataaaggcatatacaaggagggaatacttgaagggggtataagtggatgtctttgctgctgttctttctctcatttcccttttccttaggaaattgatctgtcatattttcaactgctatctctactggtgactcaaatagatatctcttctggatccgctacccagacactgaggatttttgcaccatcctaaacttcagatctccaaacccaaactctgtctctcccaaccagattaagtctcattttctgccttttatagtacccttcttctaatcacccaggctcaaaatcattgactatttctgcatatctgtacatctttatatttatcactcaccatggccacttattctggattgtgagtagatcaaaagaatagagagatttttaatcaagtgagcctaaatatgcaaagcaagtatggaggagagaaggaaatgaagtgagactctcaggtcacttccatggaagacacagatggtagagttttgacttagtggcaccgagatagatctgtttcagggcaagatagaacagtgggagagatcccggctgggcgtggtggctcatgcctgtaattccagtactttgggaggctgaggtgggcgaatcacctgaagtcaggagtttgagaccagcctggccaacatggtgaaaccctgtctctattaaaaatacaaaaactagccaggcatggtggtaggtgcctgtaatcccagctacttggcaggctgaggcaggataattgcttgaacctgggaggtggaggtttcagtgagccgagatcgtgccactgcattccagtctgggtgatagaaagagactgtgtctcaaaacaacaacaacaacaacaacaacaacaacaacaacaaccaggagaaatccccacattccttggcctgaaaatgtatttgtatgtacattacctgttaacttccttaatattggtatatcaaattttgatagcgttttgctttcaaagttttagaaaagcttagtattgaaaggaatttgcatcttcaaatttgcattttctatcacttcattttggtatcctggtgggtttacatgcaaaacacatctatctccaggctgtctaatgtgctactgtcaattaggggagttaactgtcatgtgttgtgggctgtctttccccggtgacatttaaacggagatggcatcgctatttcagatactgaagttgtgagcctagcattgggtaggagattggatttgctctctacgactcattctaagattaggattttctaacttgatagtgattcataagacaattatttcataatgcatttctactattatatagtgtgcacgtgataggcatacattgatttggacttttcctatgacaacttggaaggcagaaagttaagcacttaaaaatgatgtccaagggtggcagggtattcatgaattatactgtgattgttgaattaagctaaaataaatattatcttgattttatttaccaacatttttggtaggatggaactcaagaggtagggactgaaccttggaagaacggggattggcatgaccgtgacattaaagtgatcaatcccctgacaattagcctaagtttatacagttatacagtgttaagggctcaggttgtctctccataagcaagatagaaagggatggaaagaaataccatttccttctttgaactgaagccatttgagataaggaatgaaagagtataattttaaggcatttggtagatactgttaaaaaaagtttcagggccaaacatactttagaattgatctcctggggttttcagtcaggaccaatgttcccagtgtgatgttttcagatgcctcctctctactccagggaggaagtcagaagttattgtataaagcctgaaaatgtagttcctttagatcctgtgccagtatcccatcatcatcttgggacaaagaatatggtaaacatccacagcttacacaatagaatggaataattcctttgaaccagattaaccatagggaaaatgtcttcatatcttcatagcagccgacgcagagttgtgtgtatttagcactgacttcagacctcacttgggcgtgtgttcttcctcagcagggcttagttctccacagggaacttcttcactctaacactcttgcataggtggtcctgggttttttttttttttttttttttttgctgtcatgaaatacttttgaagagtgccaatccccaataaatatagaaggatgatgggagagagaaccggtattttatgactgccctagtaattaataagtgacctaggtaagaatggccagcaggtgctaaaatcagtgagtgaaagattgttgaagaatagagtattctccaagtatcaacccttggactacttagttacaaagatgaaatgcacctttatgatggggaatactttaaaccagtgatcaaatttatatatatatatatatatatatatatatatgtattttttttttttttttgagacacagtctcactctgttgcccaggcttgagtgcagttgtgctatcacagctcactgtagccttgacctcctaggcttaggtaatccttctatctcagcctccagagtagctggggatataggcacatgccatcatgcagggctaatttttaaatttttggtagagacagggtctccctatattgcccaggccaggctggtttcgaattctggtctcaagggatcctcctgcatcagcctcccaaactgctgggattataggtgtaagccactgtgcctggctaaatttaaacaatttaacatcattactagagtaacaaattgacatcatttacccattgacttattctctgcccatcacttagcattcctctgcactatgttccacctgaatcgaatcatgaggaaacaattagataaatccgcaaatgaggtgttatcctcttaggaaatatcagtcattatagaccagaaaggctggggagctgtttaaaggagattgaagagatatgacatctaaatgtaggatgtgatcctggatcccatcctggatcagggaaatagctatcaaggacatttcttggtccatttggggaaatttgaaaatggactatataatagataatgatattgtatcaatggtcaatttcctgagtgtgataattatgcatatataagagaatgtttttgtttttgggagattcatgttgaagcatttatgacttaattgtcataatgcttgctactaactttcaagcagttcacatttatacatgtaaattatctaaaacatgtatggtaatattcatttataataaaaataaatgttatatatgttatattcagtatattactcaatataactatatatgttatattcagtatattaatataactatatatgttatattcagtatattaatataactatatatgttatattaagtatattacaaatatttgctttatacctgcacatatacacgtttgtgtatgtatataaagcaaatatgccaaaatgttggtgattggtgaatctagatgaagggtatcttcatcacactagttttgaagctgttctgcaggtttgaaatttttcaaaataaaaagttaggaagaaagaactttgtgttagagatgaggtagtggagaaaaatgttgagctgttaaattcaggttcatgagaaaatgacatgttattattgtcgaataaagcaaagctagaagacatagtatccacaaaaataaactgtaaagtgagattgatttagatcatccagaattaactatttttggagtagagaaaggattgctgttgggcatcttagtctctctcttcttttgtttccatgatattagctttctcatgttgcaagtccttagctcacaagattgttgtaagaatgattgagaagatgtgtatgaatgtgccctgtaagcggtgaaagtaatgtctctaagcttctttgtgtttaggatgtcacttgtgctgaactgtaacacccaatgttgtattttgggttgtaacttgtgctgaagtacaacatccagtgtttgtattttctataaatgactatgcattcataggaaagagaaacttaatcagtggctttattaagactcatttcgcacatatgtaatttagaaaaagaaaactgactctgtttcactgagattaatatagttctgcccatggcatatctaaaacagtgtctaaatacatctaacaaataatagttttttttttcagtaaagaaacaaaatttcacttatttttaatgctcatttagccagttgcatttatggaaaatctttccccagaggttggaaaactagcaaacagcagctttaatataagtcaatagaacattaagtagagaaaagctcggagttacatactgtgctattatcttgtgataatttcaatttaggtttctttttaagtatgcgttcaggattttactgttagactaaatgtaaaatggagtcaatgtctgtggagtactgacatgaacctggagagtgaacattttgccccttctcagggaagcaggccagaatatctgtaaaatggtgacactttgatcctgactggaagaaaaccatgttgaaagaacgataaggaagggattatggaacaacaaacataagttgtcagctggaggagatgttcctgtcaggcattgaacttgatgaatttcttcagctggtatagacagttcaggtgtaggctgtagttttcattggtagtggctgtggggtgctgcaccagccagactgacactaggttgccatccttctcagtgggcacatgaggaaatcataatgatggctatgttagcaaccactgggtaattattctgtgctaggagtgatgttcaatgttttctgtgtattttctcagttaaacctcactatatccccgaggtaggtaagaaatatttctaatattctttttttatagatcaggtggactcaggttagataacttatgtaaggtcatagagataatagcggccgagttgctacttgaacccagtttgtctgactctagagcctgttttataaccaccacgctatactcaactgattctctaaagttgatatttgagagaacagccgaaaaagatgtggaagctttttagctatagagagatgcgttcagcaatgattgagtaaaaaggattgaaattactctctcaacgtaacatactaagaataactaggcaatatataggacagaacagttgtcagacattaggcaagcagcacagacagtgacctttcagagaaggcaaacaaacgagattgttgcagcttgctgcctggagagagttctaggctgaggcacaggaataacgtattatattcctagacatataacagagcccaggaattaccctaagttgaggagacagagttcagaggttggagaggctaaggctgctagaattcacagggccagatcttggttagaagagatctaaccaaggttaggagaacagagaggtgactctggagatctgctgagttttcagtgaggaaactcctgaggctagagaaagatgcaggagagaatcaagaattgggtgcagtcatccaggagctcaatagtttgtttttttttttcccctatcacccagagtagaaaggccctggttctcagggaaccattgtctcctggtgggtctcatggtggagccaaatttgcccttgaccaaaagttcttctggtcttacttggcagagcttaagagcaagccatggaaggaacaggttgtatccaagtaactttattgcacccagctcaagctcagcaatatttaaaagaataaaaagctccagcaccaacaaagtaacatgtatatttctgaaatccaataaaaattaccggtcattcaggttgggtgctgtggctcacacttgtaatcctagcattttgggaggctgaggcaggaagattgcttgagcccaggaattcatgaccagtctggacaatacagtgagacccccatctctggaaaacaatttaaaaagttgctgggattggtgcggcacacctgtagtcccagctgctcaagaggttaaggtgggaggattgcttaaatccaggagtttgaggttgcattgagctatgattgtgccacttcactccagcctgagtgacagcaagaccttgtctccaaaaaagtaaaaagaaaaagaaattaccaggcattcaaagaagcaggaaaatgtgacccataatgaggagaaaaacagtatatagaaaaaggcctagaaatgacacagatgatagaattactagacaaggactgctatggactgaattgtgaccctcctcatctttaccaaatccgtatgttgaagtcctaactcttaatgtgatgataattggagatggacactttggtaatttggtaattagtgtcaggtgatgttatgagagtagggcctttatgataagattaataactttataagaagaagaagagagagatacagattaccttttttgcgtgtaccgtgtgagaacacagtgagaaggagcaatgtgcaaaccaaaaagagggctctcaccaggaaatgaattggttggcagcttgagtttggacttccaacctacagaatggtaagaaataaatatctgttgtttaagccacccagtctatggtattttgttatagcagcctgagctaatacaaggacattaaaagaactattgtaaatatactgcatatgttcaagtatgtagaggaaaaaaaaagagtatgataaagagagtcatggaagatataaaatagacatgcattaaatttctagagttgaaaaaatatgatacagaagatacatgagagggataaacagcaaccattagtaaacttgaagatatagcaattatctaaaatgaaacatgaaaaaagaagactaaaaagaattaacggagcatcagtgagtagtgggaccgtagaaaatagcccatcatgtttataattatagtcacaaaaggagtggaaggaaagaaacataccttaaaaaataatggctaaaaaattaagagcggattgggaaggaacagaaaaaaatctaaagaaatagtggctgaaaaatatccaaatttgctgaaaatcatcatcccacagacccaaaatttcaataagctccagttagaagaaagtgaaaaaaactacaccaaggcacataataatcaaaagcagtcagagacaaaggacattatgcacagaacaaaggtgatattgagcgaactccttgttggaaacaatgcaagtcggaagacaatggagcagcacctttaaggcactgaaagaaaaaaaactctcacctagacttccatacaaagtgaaaaaaaaattaaagaatagatgaaataaagaccttcccagacacacaaaagctgaaagaatttgtcaccagctgaccatcagtacaggaaatgttaacagaaggcttttagacagaaagaaaatgataccagatggaaactgaatctgcacaaagaaataaaaagcactagaaaaggtaaatatgaacataaatacaaaagacttcttgtttttaaaaatatctttaaaaaacaattaactgtttaaagcaaatattataacaaggtattatggtagtaaaatctgtgacaatagtagcacaaaggccaggaaggggcaaaagggaaaaagtgtcatgaagttattataatatatataaagtggtataataaaacttgaaggtagactgtattaatgtaaagacgtttattacaaaacttaatgaaatgcctaaagaaacaatataaagagatatagctaataagccaataaagaagataaaaaggaatcataaaaaacacttaattaaaaagaagttaaaaatgagcaaaaaggaacaaagaacagcttggaaaaatagaaaacaaatagcatgacgatatatttaaactcaatcattttaatagccacattaaatgtaaatggtctaaactctgtcaattaaaagacaggctctgtcagactggattaaaaaaaaaaagcaggacccaactttccactggctaaaagaaatctattaaatatgaagacacagatagggtaaaagttaaaggacggaaaaagatacagcatgccagcgttaatcaaagaaaggtggagtagctgtatgcatatgggacaacgtatatttctgagcaaggaatattactaggaataaagagggtaatttcaaaatgataaaggaatcattttctcaagaaaacatagcaatcctaaatgtggttgaagtttctaatcctaaactgaaagaagaaatagccagaccaccatttaggtggagatttcaacaccttactcttgataattggtagaacaaatagacagaaaatcagtaagaatacagaataattgaacaacactataatcaacatgatcaaattgacatttatagaacgtcctatctcacaacagcagaatgcagattcttttcaagtgcacacagaacatttaccaagatagaccatattttgggccataaaacaaatcttaatcaatttaaaaagatttaagtcattcagggtatgttttctgaccacagtgggattaaattagaaattaataacagaaagatatctggataatccccaaatatttggaaaccacacaacacacttgaataacttgaatcaatacaagaaaaaatcacaagtgaaattagaaaatattttgaagtaaatgaaaattaaaacaacatattaaaacccacaacaacaatttgtgagttaccaataaacaatgcttaaagggaaattaatagcattaaaagtgtattatattagaaaactagaaggttctaaaaccaatgacttaagcttcaaccataagaaactagaaaaagaagagcaagttaaagcaaaagtaagcagaagaaaggaaataataaactataggagcagaatcaatgtcataaaaaacaaaaataatagagaaaatcagtgaaagcaaaggctagttttctttttactttattaaaatactgagcttattttacatgtatatttttgtcttcccactatttccatgtctgaccattggtactactatgtatgcagtacatacatactttaagcatgtatggaatgttaacattccatacaaactaaaaaccaaggaaagggaggagttccatttttacaaactaaatgacattttggacaacacattctgggcaatgggacctgggcaacatttatcaaacatggtaaggaaagttctcactctgcattataaaaaggacagccagatatcatctgttacagaaacgaaataagatggaaaatttttaacaaactgttaacactattttcttgaagacacttcatccactgccagagatctgaatagcctcctggtcagtcatccagaagcaactcttcacataattgatgaacttggcttccactttgggaagagaaccacctttttctgtgtttgtttgcatttttgctttaatgtcttctacagaattaggtccttttgctgttttaggagttttttcctggttttttttttttttttaggattctcatccttttgatcttggtgttgatggttttgagtcttttccatggtggaaatgatttttgtgcatttttggctggagcatctcatatagatttcttcactggcactttttcttcagtttcctcatcatcaaaatctcctcctcctcctcttccctcctcctccacttcctccgcctcctccttcttcttattcttattctccttctctttctccttcctcttcctcctcctgctccccctccctctcctcctccttcttcttcaggagtggcagcaagttttactttttttctgtggaaacttgttaccacttccaggggcagatcactttccagttacacttaagagtttcacatcctcctcctcttcgtcttctgactctgcatcttcctccacagatactaaatactgtctatgaatatgtacaggccctgaaccacacttcaactgtaagactgggtggtgtaatttcaaagcccccaagggaaatcactggctgtacagacattttcaatttttttctttttctttttttttttttattatactttaagttctagggtacatgtgcacaatgcacaggtttgttatataggtatacatgtgccatgtttgttggtttgctacacccatcaactcgtcatttacattaggtattttcctaatgctatccctcccccagtcccccaccccccgacaggccccagtgtgtgatgttccccaccgtgtgtccaagtgttcccattgttcagttcccacctatgagtgagaacatgtggtgtttggtattctgtccttgtgatagtttgcttagaatgatcacttccagcttcatccatgtccctgcaaaggacatgaactcaacttttttatggttgtatagtattccatggtgcatatgtgccacattttcttaatccagtctatcattgatggacatttgggttggttccaagtctttgctattgtaaatagtgctgcaataaacatatgtgtgcatgtgtctttgtagtagcatgatttataatactttgggtatatacccagtaatgggatcactgggtcaaatggtatttctagttctaaatccttgaggaatcgccacactgttttccacaatggttgaactaatctacactcccaccaaccatgtaaaagcattcctatttctccacatcctctccagcatctgttgtttcctgacttttcaatgatcgccattctaactggcgtgagatggtatctcattgtggttttgatttgcatttctctgatcaccagtgatgatgagcattttttcatgtgtctgttggctgcataaatgtcttcctttgagaagtgtttgttcatatcctttcccactttttgatggggttgtttgttttttttctggtaaatttgtttaagttctttgtagattctggatattagccctttgtcagatgggcagattgcaaagattttctcccattctgtaggttgcctgttcactctgatgatagtttcttttgctgtgcagaagatctttagtttaattagatcccatttgtctattttggcttttgttgccatgcttttggtgttttagtcatggagtctttgcccttgcctatgtcctgaatggtattgcctaggttttcttctaggatttttatggtttcaggtctaacattaagtctttaatccaacttgaattaatttttgtatatggtgtaaggaagggatccagtttcagctttctacacgtggctagccagttttcccagcagcatttattaaatagggcatcctttccccattgcttgtttttgtcaggtttatcaaagatcagatggttgtagatgcatggtgttgtttctgaggcctctgttctgttccattggtctatatatctgttttggtaccagtaccagcctgtttttactgtagccttgtagtatagtttgaagtcaggtagcacgatgcctcccactttgttctttttgcttaggattatcttggctctgtgggctcttttttggttccatatgaactttaaagtagttttttccaattctgtgaagaaagtcagtgatagcttgctggggatagcattgaatgtataaattaccttgggaaatatggtcattttcatgatattgattcttcttatccatgagcatggaaagttcttccatttgtttgtgtcctcttttattttgtttagcagtggtttttagttctccttgaaggggtccttcacatcccttgtaagttaaattcctcggtgttttattctctttgtagcaattgtgaatgggagttcactcatgatttggctccctatttgtctgttattgctgcataggaatgcttgtgatttttgcacattgattttgtacagacattttcaaagttggcagtgttactttaattggactgcatttgtaattcattgcctctgcttcaacaatgtgcaattcatcctttgcatgagtccctaacctgactgttcttaaagataattggtgctcattttcatcagtatccactttaaagcgataatctttgttggttctggggcctcagggggctcatgtccatgtccactgagccttccatggggtggtggcatatgcttaggtaggagagaagatggatggagataaatgattactgctccagagaagagctgtacaggacagaatcacaccagggctagttatttgagagtatgaaaatcgctgaataggcagaatgattaagaaaaaaagatagggaacaaagaaccaataccagggatgacagaaatgacattactacagattgtatagatattaaaagaatagtaagggaatattatgagtagctctataccaataaatttgataacttctacatgaaagagaaaaatttcttgaatgcatactatgaaagctcacttaagaagacataggcctattaagaaacttaaatttgtatttaagaacattaccgttataaaaacaaacacctccagactcagttgccttcactggtgagttctaacaaagattgaaggaaaaagtatcaattctacagactctttcagtaaatagaagtgggcacaaggccagcatgaccttgattctcaaagctagacaaagcaattataataaatgaacattgtccacaggagaaaacaggaaagatctaaaatagacaccctaacatcacaattaaaagaactagagaagcaggagcagacacattcaaaagctagcagaagacaagatataactaagctcaaagcagaagtgaaggagatagaggcatgaaaaacccctcaaaaattcaatgaatccaggagctggttttttgaaaagactaacaacatagatagaccactagctggactagtaaagaagataagagagaagaatcaaatagacacaataaaaaatgataaagttaatgataaagtttgtatttcccacagaaatacaaactaccatcagaaaatactataaacacctctatgcaaataaactagataatctacaagaaatggatgaattcctggacacatacattctcccaagactaaaccaggaagaagctgaatctctgaatagaccaacaacaagttctgaaattgaggcagtaattaatagcctaccaaacaaaaaaagtccaggaccagatggattcacagccgaattctaccaaagatacaaagaggagatggaaccattccttctgaaaccattccaatcaatagaaaaagagggaatcctccctaattcattttatgaggccagcatcatcctgacaccaaaacctggcagagacacaacaaaaaaagaaaatttcaggccagtatccctgatgaacattgatgcgaaaatcctcaataaaatactggcaaactgaatccagcagcacatcaaaaagcttatccgccacgatcaagtcagcttcatccccaggatgcaaggctggttcaacatacgcaaatcaataaacataatccatcacataaacagaaccaatgacaaaaaccacatgattctctcagtagatgcagaaaaggcctttgataaaattcaacagcccttcatgctaaaaactctcaataaactaggtattgatgaaacgtatcacaaaataataagagctatctatgacaaacccacagccaatatcatactgaatgggcaaaagctggaagcattccctttgaaaaccggcacaagacaaggatgccctctctccccactcctattcaacatagcattggaagttctggccagggcaatcgggcaagagaaagaaataaacggtattccaataggaagagaggaagtcaaattgtctctgtttgcagatgacatgattgtacatttagaaaaccccattgttggtaaagggatcgattcaccaagaagagctaattatcctaaatatatatgcacccaatacaggagcacccagattcgtaaagccttagagacctacaaagagacttagactcccacacaataataatgggaaactttaacaccccactgctaatattagacagatcaatgagacagaaggttaacaaggatatccaggacttgaacccagctctggaccaagcggacctaatagacatctacagaactctccaccccaaatcaattgaatatacattcttcttagcaccacatcacacttattctaaaattgaccacataattggaagtaaaacactccttagcaaatgtaaaagaacagaaatcacaacaaactgtctctcagaccacagtgcaatcaaattggaactcaggattaataaactccctcaaaagcgcacaactatgtggaaactgaacaacctgctcctgaatgactactgggtaaataatgaaacgaaggcagaaataaagatgttctttgaaaacaatgagaatgaagacacaacgtaccagaatctctgggacacatttaaagcagtgtgtagagggaaatttatagcactaaatgcccacaagagaaagaaggaaagatctaatgttgacaccctaacatcacaattaaaataactagagaagcaagagcaaacaaactcaaaagctagcagaaggcaagaaataactaagatcagagcagaactgaaggagatagagacataaaaaccccttcaaaaatcattgaatccaggagctgtttttttgaaaagatcaacaaaatagaccactagccagactaataaagagaaaagagagaagaatcaaatagatgcaataaaaatgataaaggggatatcaccaccgatcccatagaaatacaaactaccatcagaaaataccataaataactctatgcaaataaactagaaaatctagaagacatggataaattcctggacacatacaccctcccaagactaaaccagggagaagttgaatctctgaatagaccaatgacaggttctgaaattgaggcaataattaatagcctaccaaccaaaaataggccaagaccagatggattcacagctgaattctaccagaggtacaaagaggagctggtaccattccttccaaaactatttcaatctgtagaaaaagagggaatcctccctaactcattttatgaggctagcgtcatcctgataccaaagcctggaagagacacaacaaaaaaagagaattttaggccaatatccttgatgaacatcgatgcaaaaatcctcaataaaatactggcaaactgaatccagcagcacatcagaaagcttatctgtcatgatcaagtcggcttcatccctgggatgcaaggctgattcaacatatgcaaatcaataaacataatccaccacataaacagaactaacagcaaaaaccacttgattctctcaatagatgcagaaaaggcctccgacaaaattcaacaggtcttcatgctaaaaactctcaataaactaggtattgatggaacgtatctcaaaataatgagagctatttatgacaaacccacagccaatatcatagcgaatgggcaccctttgaaaaccgtcacaagacaagaatgccctctctcaccactcatattcaacgtagtgctggaaattctggttagggcaatcaggcaagagaaagaaataaagggtattcaattaggaaaagaggaagtcatattgtctctgtttgcagatgatatgactgtgtatttagaaaaacccatcgtctcagcccaaaatctccttaagctgataagtaacttcagcaaagtctcaggatacaaaatcaatgtgcaaaaatcacaagcattcctatacaccaataacagacagagagccaaatcatgagtgaattcccattcacaattactacaaagagaataaaacaccgaggaatttaacttacaagggatgtgaaggaccccttcaaggagaactaaaaaccactgctaaacaaaataaaagaggacacaaacaaatggaagaactttccatgctcatagataggaagaatcaatatcctgaaaatggccatactgcccaaggtaatttatacattcaatactatccccatcaagctactactgactttcttcacagaattggaaaaaactactttaaagttcatatggaaccaaaaaagagcccacatagccaagataatcctaagcaaaaagaacaaagtgggaggcatcgtgctacctgacttcaaactatactacaaggctatagtaaccaaaacaggctggtactggtaccaaaacagatatatagaccaatggaacagaacagaggcctcagaaacaacaccatgcatctacaaccatctgatctttgataaacctgacagaaacaagcaatggggaaaggatgccctatttaataaatgctgctgggaaaactggctagccacgtgtagaaagctgaaactggatcccttccttacaccatatacaaaaattaattcaagttggattaaagacttaatgttagacctgaaaccataaaaatcctagaagaaaacctaggcaataccattcaggacataggcatgggcaaagactccatgactaaaacaccaaaagcatggcaacaaaagccaaaatagacaaatgggatctaattaaactaaagatcttctgcacagcaaaagaaactatcatcagagtgaacaggcaacctacagaatgggagaaaatctttgcaatctgcccatctgacaaagggctaatatccagaatctacaaagaacttaaacaaatttaccagaaaaaaaacaaacaaccccatcaaaaagtgggaaaggatatgaacagacacctctcagaagaagacatttatgcagccaacagacacatgaaaaaatgctcatcatcactggtgatcagagaaatgcaaatcaaaaccacaatgaggtaccatctcatgccagttagaatggtgatcattgaaaagtcaggaaacaacagatgctggagaggatgtagagaaataggaacgcttttacacggttggtgggagtataaattagttcaaccattgtggaaaacagtgtggcgattcctcaaggatttagaactagaaataccatttgacccagtgatccccttattgggtatatacccaaaggattataaatcatgctactacaaagacacatgcacacatatgtttactgcagtactatttacaatagcaaagacttggaaccaacccaaatgtccatcaatgatagactggattaagaaaatgtggcacatatgcaccacggaatactatacagccataaaaaaggatgagttcatgtcctttgcagggacatggatgaagctggaagtgatcattctaagcaaactatcacaaggacagaaaaccaaacaccgcatgttctcacttataggtggaagttgaacaatgagaacacatggacccagggtgggaaacatcacacactggggcctgtcggggggtaggggactgggggagggatagcattaggaaaatacctaatgtaaatgacgagttgatgggtgtagcaagccaacaaacatggcacatgtatacctatgtaacaaaactgcatgttctgcacatgtatccccgaacttaaaatataaaagaaaaagaaatgaagattattacaggccaatattcttcatgaacacgtatgtaaaagttattaacagacttttagccaataaaattcaacaatatgtaaaaaagataatatcatcgccaagtggggtttcttccaagaattcagggttggcataaccttaaaaaagatcaatcaatgttttccatatcagcagactaaaaaggaaaaacaatatgtttatcttaattggtgtagaaaagcattttactatgcgcaacatcaattcttgataataactctgagcaaactgggcatagatggaaacttcttcatcctgatatcgggcatctacaaaaaatgtaaagctaacgtcttacttgatggtgaaagacagaaagttttcccctgagatgaggaacagggtgaggatgtttgcctcattacttctatttaacatagtactggaagttcttatcagtgcagtaaggcaggagaaagtaataaaaagcacacagattagaaaagaaggatacaactaccttcattcacagaccacatgattgtctatgtggataatcgtagggaatctgaaaaaaaaatcaactgaactaatacgtgagtttagtgagaatgcagtatataagccaatataaaaatcatttgcatttctatgtactggcaataagcaattagaacttgaaactgaaaacaatacaatttatgatagcatcaaaacttatgaaatactggggataaatttgaggaaaaatgtgtaaaacttctacactggaaactacaaaatgttgctggaaaaattaaataaggcctagtgaaatggggagatatacaatgctcatagattggaagactcaatattgttaagatatcagttctccccaaattgatctatatatttaacatgatttcaattgaaattccagaaggctctttgttttgtagaatttgacttgctgattcaaaaacacaattttggaaaaagaagaacaaagttagaacacttatagtatgtgatgttaaaccttattatacagctctggtaatcaggacagtgtggtaatatcatacaggtagaagatatacagggcgatgtagagcagtgattttccacaaagacaccaagttaattcagctgggtgaggagaattctttcaacaaggggtgcaggaacaattttatatccagaagcatgaaaagaaaacaaaacaaaacctgagcacttacctcacagctcatggaagaattaacttgaaacatatcataaacttaaatgtaagagttcaggcaattaaacttctagaaaaaaatgtagactgtcttagtgactttgggctaggcaaacattttaagaatatgtctcaaaaagtataactataaatgaaaaaaatggatacattgactttatgaaaatgaaaacctttttcttttcaaaagatactaataatcgcatgtcatgactagggagccagagaataggagaaaatatttgcaaaatatgtatcacacatatataaagaactcttgaaactcagcaggaagaagacaaaaacccaattagaaatgggcagaagagttgaaggagcctctttttgtcaacatcattagtcattaagtagatacaaagtaaaaccacttttgttaggatggctaagatggaaaaggctgaccttatcaagagttgaaaaaggcctggtgcggtggctcatgcctgtaatcccagaactttgggaggccaaggtgggcggatcaggaggtgaggagatggagaccatactggctaacatggtgaaaccccatctctacgagaaatacaaaaaattagccgggcatggtggcgggtgcctgtagttccagctactggggaggctgaggcaggagaatggcatgaacccggaaggcggagcttgcagtgggccgagattgcagccactgcactccagcctgggcaacagagtgagactccatctcaaaaaaaaaaaaaaaggagttgaaaaatgtttggagtaactggaactctcatatgctcctgtacatacattttattttataaaatagtacaaatattttataaaataatttggtagtttcttaaaaagttagataccatactccccagtgattccactccaagatagttttcgaagagaaataaaaacatatgtgtgccatggacacaaggaggggaacaatatgcactggggcctgtctggaagtggggtggggggagggagaacattaggctaatacctgctgggcttaatacctaggtgatgggttgataggtacagcaaaccgctatggcacactcttacctatgtaacaaacctgcacatcctgcacatgtaccctggaactataaaaataaaaataaaacaaacaaacaaaaaacatgtgtgcaaacatgtgttaaagacttgtacacaaacatgcatagcagctttatttctgatagctctaaactacaaacaatccagaattccaacaggtacatggttaaattttgttatactcatacaatgcaatagtactcataatgaaaaggaaatatcaatatatttaatgactctcaaaagaatgaaaatccaagaaatgtcaagcatgccagtaagacaactgcactcaaaggaaactcaaagtgagtgaaaggaaccagacaatagtaatttgtccacactatatggctcaatttcaataaaactgtaggaaatgcaattgaatctatagcaacagaaagcatattgttggttccctgggtttgggttagtgggtaaggatggggaatgcattacaaagagatacaaggaaacagttgatgatgaaaacgtccattatcttgattgtggtgatagtctcatggacatgcatatatcaaaatccattaagttgtgcactctaaatatatgcattatattgtgagccaattatatcttattaaagctgttaaaaaaagaagatatagagaatttcgagactaagtttagattgtgcattgggtaagaatcctaacttctgcctttggtgaaacatttaagtagcttattaacagttgtggtagaagtctggacatttagagcagatgagaccttaggaatgatgtttgacattgcagagaagtaaaatgaattgttcaggatagttacaggtagtttaattaagcccttaacggaatgctacattttgtgacacacctatgagaatgttatggaagacaggcctgccctgtctacctttgtggcttctactctgtcttggacaatgctttgtacacagtggtgctcagtaaatagatgctggctagtcaaagcgtgatgtttcctaaactgaattatagatgagaagtgcttcactttcttggtatagtggaaagatgcattcagtaagtggtagatcttattacagtttccacttattgagctcatttggagtttcctctgggcacaaagttgttttagtggcgtgcttgacactccttgggtctggaagagcttctgaagtggaacataaattgtgggggtacatagtatttaagatctgagtttggctgcaagtgacagagaagccaaacaacagtggcttaaacaaggtggaaatgtacttctctgtcacctaagtcctagctaatgcaggggctctgctctgggaaaccattagggacccaggcttgttttcttttttccccaccgtctctaggtcttgcctttgtccagatgtttcacagtggctcttatcatgtccactttccctctaacaagaaggggtagcagaaggaggagtgaaaactactaccagaaatttctacccatcacttctgcgtggattgttttagccagagctgttacttgaccacattgcctgcacgtgatctgggcatgaagtcttaccttggaagaactgagaatcgatactgtgaggctgcctagcagccttagccacagggaaggatttgagtatcacagaagctgtagccttacagatgattagaattcatggaaaatgatatcataatgtctcccgattgttcacttcttgcctcaattcaggaagtgacacagaggggagacttgagtcatgtggctaggagacaggctcacctttctaccccatccctggtccatccacttctgcttcaggcctgtgaatgaaggaaataacctcccctgtgtctctaaagttacattctggtgagtatttccttccaaaaaaagccacaaaatgttcccgtgaaaggtcgatgtgtgggaatggaaacttcgattaaaacaaacaaagaaacaaaaactgttacaagagccatctgagaccaatcacaggaaatttgttatcatcatctaatggataatagtttagtcattgctgagtacttcacttttacaattttgtgaagcagctgattttcatttccactttttcacagggaagaaacggagtcatggaaggatatagaatgaagtagctctgttcaacaaggaaatctgtagcaaaaccaatcctggaaacccaaactaggggtttgatatccatctctttgcccatcaggtcatatttcttttggagaaaattagaaatgatctaaagaaaaaggaagaaaattgaagaactttcctccccaagccctgtattaacagaatctacatttttctgttgattgcacagaggtcagccccccagggttcacgggaaactggacggcctcatcctcagagccatgctttgcactctttatcttttacacagggtgcaaaagtgttgcttagcaacatcgattcttccagctctaacaactgcggcagcccgcacagctgacaatggagcagagtttgcgagtgagctcctcatttttcagcttcttcactgtggcgagagggaataaagaaagaaaaggcaagtgggatgaaagaaacacagtcaacagcacagcgtggaaaaggaccggctgatggtggggaatggtcgggtaccacacatcccacacacgcttagtaaatgctcgccaagagaattaaaagggggtgatcacagcagcagaggttaattagggaaactaaagagtcaatagaatgtgatggccgggcagtctggaaatggaagtttttgactgagtgggtgtctaagcacattcatcccctccctgttttggggttttgtttctttttaggccaggttattgggcgtgtttttaagggaaatagaaaggattgaggaggacttcttgtttttattttattttatttttttgcaactctgttattggcaaacctaaataggggttcaacagtttcttattgagttataagtgtttacaaagatgttcagaacagcctgctttcaaaacttcagtgactgtaatatcttgggctggcttctttggccttgttcaacagaggagtgtgcaacagtgaacacttgcaactgatctgcaacattcaaggtgattttaatgttggaaataccctcatttcctggctcacagtctttctccctccttccatcctttcatggagataaaatggaagaacatgtgctggccactcatatgagatatttcaaatctgagagattacaatctttcatatcaaatgcagttacggccctttgtagagcagttttctgaagtgaatcagatgagtttttcagagctaaaggaagtcaagatgaaataaataaaagcagagaggaaattgaaaggggtggtggttgggggaacatatgttttcagatgatattttaaaatagatggagagctgatgagacagagatactgaaaaccgactccagatggcaggaatagcaatggcaagctggtgtgaagggacagaacacaggctggcaccagacaggggaggacgcgaaaggagaggagggaagcaagctgagcaaagcagccatgtcggtgggtgggctactcagtgtgtgaggttatagaagaagaaatgggaatcattgaattcatacccgtcacttttagtttaataatttactcagtaggttcatgtcattttaaaaaatgatatgtctatgaaaaaggtatatatgcttcactctgttttgattttatttttatttttagagacagggtctttctctgttacccaggctggagtgcagtggcacgatcatggctcactgaagccgtgagctcctgggctcatgccatcctaccgccttagccttccgagtagataggaccgcaggtgtgtgccaccatgtccagctattttttttttggtgggtgtggtttcttgctgtgatgcccaggctggtctcgaactcctgggctcaagtgatgtttctggttccaccttacaaattgttgggattatgagattacaggtgtgagccgccatgcctggctagatttatctcactttgatttctttgctaaacctgtggctacaggcaaaacaactgttcaagtgagaggccatgggggaaagctggccagaggaggacttccttaattttttttgttttctatatacattcagcttatgatgatacatatgtatataggagtgtatttatgcgctcctgtaacaatcttgtaggacaccaaatgaactgagtttatcttcatggattgattgggaagggaggaatttttaagagagggaattgagaaacaagaaattattccaggtctagcagtaagatgtccagaatggcttctcattactaagggaggtagaacaagtcacccctatttctgtgtgaaaagatgcagttttatttgcataataattattaaataccattgggtttcctgagtctgcatttggtaccatatttcaattcaatgagcatttattgatgacctgctgtgtgataggaagagttgtagggctgcaaagaggaaagagtcatagtttgatctttgtcttttgtgtggatgcgtgaaaatgtctcctttcatttctgcactctctgtgtgacagtgtgtgtgaatgtgtacaagtgtgtgtacgtatgtgtgcacgtgtgagtgagaatgtgtgtgtatgtgaatgagtgtgtgtgtgtgttgctatcctcctacatgaaagggccctgcagctttagccctattgctgttataaattcatatccactcacatttttgcctcttttcagtagacccattgttactgatttcatccttttgcaacatttagataattgttgttatcagcacttagctaccagggttacagaaaacatcaagattcaaaaggagattattacgaatgttcatttcacgtagggtcacaaattacagcagtaacacttgtctagaccattaaacaaggaaaaaaattggtatacagaaggtgactgcccttgtgctactagagtctttctcatggagctgtgactattacatccataaaaaagtccaatgtcttcatttattgggcggttcctgtcgtgtttcaggggaatgacaatcatttcagttgtggtgattgaagtcgttgctttgggtagcttgcattccagtttcatcagaaattgaccgagacttatcttttctgtttacacttctcttggacttctttcatttgttcttgtagcttgccatggaaacctgtttgtaaatcttttgtgggtaatgatgtaaccagaatagtacaggcagagcccagggcctggcaatatacaaaatgactcatttaagccatgctgaaatggaggtcagcctattgctatagaaaacagaaaggacacaccattgtattgagctcattttatttatgtatttttttggggacagagtctcactctgttgcccagcctggagtgcaatggtgtgatctcggctcactgcaacctccacctcccgggttcaagtgattctcctgcctcagcctcctgagttgctgagattacaggcgcccgccaccatacctggctaatttttgtatttttagtacagacagggtttcacaatgttggtcaggctggtctcgaacccctgaccttgtgatctgccccaccccccccccggacctcccaaagtgctgggattacaggcgtgagccaccgcacctggccggatattgagctcattttatttgcaaagaggcaatgaataattattataaattttatttggaaacaataaagtattaggagagtggaggtgaaaatttccaaagtagtggtatctgggaaggtaaaactcctacaagtgtatttaaataaaatataagccaggaaatattaccttttttttttaaggatgccttggagatttttgattgagcctttttgtaatagagaagggtagaggaatttgtggggagctcagatgaaatagctgggtctagagtgatgcaaaaaggagagataagttaatgaaagaaagaccaatgtgatgaaactagccaaaatctatgttaaaaagatatacactcaggccgggcctgatggctcatacctgtaatcctgtcgcagctgagggaggaggattgcttgagaccaggagtatgagactagcttgggcaacatagtgagacttcacctctataaaaaattgtaaaaattagccagacatggtggtgagcatctgtggtcccagctactgggaaaactgaggcaggagggttgcatgagcccaggagcttgaggctttagtgaactatgatcaggtcactgctctccagcatgggtgacagactgagaccctgtctcaaaacacacacacacacacacacacacacacacacacacacactcaaaaccaagttgctctaaagcccgtgtaaacattctgttttttttctttaaataaactctttaataaaagggcttttaaacaacttcttcaggctaatctaagatactagcctcaacagtatttttgagaagcgagttttatatgcaaattgtattatggtttatattccatgtatatccaacaaggggaattagctgactgaggatgagaatagggaaaggcagggaatcaaaggacagtgggaagagagagggaaggacgaggatcctagaactcagtggtattgaagtccacagtagtgtttgtttctttccatgtatgctttttccactccaagtcacaatattaacaacaggattattttgacatattacatttctctttaggggaaaataaatggacatgcttatgggatctatttaatcctatttaaagcctaaagcacagcatcactattgtgtgtaatgttacatttcgaatgttagagccagaggataatctggtctaactttttcattttactgactaggaagctgcaacctaccaaggttaaatgacttatccagtctagttaggggatttgtagagctcagaacccaggttttcttacattctagttccgtcatcttttgaacagtactaagaggactcatggatgagggaggcatgagagagataaccccaagtcttccttgtcattttctcaaaaagctgaagggaatatattacatctcattgcatcaagatgaagctaaccagtgactaggagacagatgccactgagatgtccctttctctctgagcaccaagtgccccaaattcagatttaagatgaattgatttcaaaaaccttcaagatttaatagaaaattgccattcttgtttggactctacttacattaaaatcacatcctaaataatccgattagcttcaaaatccttaagcttaacagtttaaatagcagtttagtgatttggttttaaaaggtacagttatgctaatagcaccgtttaacacccttaactcagcatttcccaaaagtttagtgatttagaattttaaaattctacatcgaagggaatctgtagttggtcctggccatctttccttgtcaacggtcatcactctgaccatgttcgtcttatcttttatctgcttttcttaggctagaatttccctggttccatcactacctgggccaaatgtctttaccttttaccactccctagataactccctgttggatggaacttttgtgagggtcagctttcagggcaggggttctgaaatcttagtggacttatgaacagtctagagagctgattcatgggccccacctctagattctgatatggttggttggtctgagatgaggccttggaatgtgaattggaaacaaacctttctatctaagtgagttctcaatgggatgcaggtggttcccagatcataatgcttagtggtgtcagattttgaatacactactatggatataggcacacctacactttggatcccttcacctaattatagggagcgttttctgtgttctgtctgttggcccaaggattttcttcaccatcacctgggaaactatgacgagagggttctagtctctcctacgatactgccattcttccaattgctgaatctggttcggtgaaattaattttacaatgtgagacttagaagcaaagaggtgaccttgctttgtcatctgatgttaacaggagtctgtaatattcatgccaccacccaagagtcccatttacaaaggagcagacttctggtcttctttagccttttttgtttcttccaacaaaaatccaggctggagtggattagggcaatctcagctcactgaaacctctgcctcccaggctcaagtgattcccttgcttcagcctccgagtagctgggattacaggcactccaccaccacatctggctaatttttttttttttttttttttttttttttttttgagacggagtctcgctgtctcccaggctggagtgcagtggcacaatctcggctcactgcaagctccgcctctgtggttcacgccattctcctgcctcagcctcccaagtagctgggactacaggcgcctgccactgcacccggctaattttttatatttttagtagagacggggtttcaccgtattagccaggatggtctcgatctcctgacctcgtgatccgcccacctcggcctcccaaagtgctgggattacaggcgtgagccaccgtctccggcctacacctggctaatttttatatttctagtagagatggggttttgccatgttggccaggctggtcttgaactcctgacctcaagtgatcctcccacttcagcctcccaaagtgttggcattacaagcgtgagctaccacacccagcccggtcttttttagactcttaaggacccataagaacaaattaagttgagtagtgatgcttaatgtgtcaaaccacagataaatatagttttctatggaaagcttagaatggaaaatagtctttcacaaaaacgacaaaatgttttctggttcccgcaaaaaatatctctgtagaaaagaaggtcagtgagaactttgtgtgattcatggatcatgagtaacacatgcaatgaaggctaaggaaaccagtctaggacatttttataaaagattttcacaagaaatgtattgatttgtttacgaagcagtagatttttcaggataaaatattgttctcctcttccagtggatgagcttagatatacctgaacaagacagagatctgtggatacatgagctgaagacattctgtatgtcttttccttttcttggttctaccaactcttaatcttgaagaaagcacttaaaatgctgtgacccccatctggttgcatattctttctcctgtttcagcttgttggcaagactggaaatttggagatggcattcagtttacacaagcttagcagcttatgaacactgatggattttttcagtgccgatggagggactgatgaacttggctttgggcgtctggttcccttgacttgatgggtgagaggaggagacagagcaagccaagagagatgacagtctcccttctccagcccatttctttttttctcacctataaaattttgtccaactcatggtcctatgataaaatgcgtccaatgcttctgggctggtggaccctggcactaccattcatgtctttcccaaatacttatcctctgagtcacccaggcagaaacagccaagtgaaaagataccatatcttgaagaatcttcatttggctctgctaaaatggaaaaaaaaaaaaaaagacttgttgctaaatgaataaaagtactcttaaaaaattatttcctcttttctccttggtagatacgcaagaagccaagaacaaaaataaaatacaataaattgtacaaggcaatttagattttcattattctcttgtcataaactgttcccacatcagagaaaatatactgtgagtccactttggatcctgtccatatgggctagctactgaaagttccagaaagactttagagtaatataatttcacaagttgcttggcatgggtctctgatggacaggctgggaaagctgataacataagctggtgaaaaggcaaaggctttttaatgccttactcgattcattcttcataagaaatatcagatgtgaaggggcctggaacagttcccaggtttgatgaaagtagagagtcaaaatagaaaaagagttaaaaagtgctttgaagaactggaactatttgtattagtaaggcctgttggctactaaaggaactggcaggtgctactctggtggtgagccattattattattattattattattattattattattattattaaattatagaggtaaaaagaagtccatgtgaattaaaatatagtattgtgactagcttataaaacacacagccagaatagattgacaagggaaattataggcaggtcagacgaacttcaaatacatgaagtgatatcggaataaatcatcacataatttactgttacttctagaggaacatagtaaaaaacagggttttgcacaaactaaatggtattagagcaatctaactgccttctatatttagaagcacaggcaaacagtgggatagtactagatatgtttattttaactttgggaagctggtgctttctcttgactgtagtaatggcatatcaatgaatgaatgaatgaatgaatggcacacccgtagaacatgtatccttgttcccacaatcaatgaaagaccatatgagtagtgatagcacataacgaccagttctgcttaatgtatctttggacaacttgatgaagaattgagaacagaactcttccattatcagattgcctgtagttgctgatactctgtaagatacgacataactaaaatcgcccttaacaaatagaagaaaaagatatgttatagggttaaattagctatgggtaaaaatatcaatagcaaatgcaagatgagaaaaaactatctgaaagtgacaaggtgggcgtggtggctcttgccggtaatcccagcattttgagaggctgaggcaagaggattgcttgagtccaggagttcaagatcagccagggtaagatagcaagactccatttctacaaaaaataaaaataaaaaaatttgccttgtgtagttgcgtgcatctgtagtattagcaacttgggagcctgaaatgggaggatcccttgagcccaggagtttgaggctgcagtgagctataattgcgccactgtacttcagccttggacagagtgagaccctgacccccatcccccaaataatataataaaatgaaagtagcaatctaagcatgaattaataagttcaagtggagagatgaagaacaacgactgaatttgggagaatttcagaggaaacttgaggtactgatagctaattggataaagaagtgaagtatttttgttttgtgttaacagtgtattttgtaggctgcctatttgtctcatacatttttttcattgtgatagaaagaacataacatctagctagcatccttgatgctttattcttttttatttatgtattgaaatggcccagacacatgaactcttaagatttttgaggaaaatgagaatccaagttcaaatgttctggcaggaaaattttataaccaagatgtttcataaggggcaacctccggcccccaacaatggaattgcatgtgtagacatttaaagtcttcttagctaaatgtgaaacacgaacttgttttcttgactgcagtcaaaggctatgttagtaagccaggaaagagatgatggaggcttgaacccagttcacagtggtagggaaggaaatacacagacgaatccgagagaggttcaggaggtggagttgaccttggggcatggaggagagggaggaatcaaaattgtgctgaggttctagttggggtggctgggtgggtggtggtgggacgctgggaaaaaattggcatttttggtatagaataatgaccttggttttgtcttgttgagccggaagtgtctgcaggtcatctgcatggatctgctggtgggttggagatgtgtttctaaagctcagtagataaatggatctagactgaaccacaaacaggaagtgaacagcaggggccagcaacgatgagctgtggtgccttctgagccaggaggaaactggctaatgacaaaaccaggtggcgatagggcggccattcagcttcctaattcctaaaggctggcatttggctccaagtgatgttgtgtgacacaggtcagtgagttggataagtaccaaaataaaagtgttaagtgtgactaatttgtttattgtataaatatattcttataattgagagagaaaacaaaggagggaatacagtccctcaatatctgtgggggtaggttccagaacatcaagtccctgacataaaatggcaaagtgttttcatataacctacacgcatcctcctgtatactttaaatcactctagattacttataatacctaatacaatgtaaatgctgtgtaaatagttgttgtattgtttatggaataatgacaagaaaaggaatttctacacttttgttcaaatattttgattggcgattggttgagttcatggatacggagggctgactgtacttgtgcccttgtgatttagaagatatccatgtatctttgtttatagcaagaatctttgtgtgtagttttagtaggcagtggttcttggggtgataaatactgttttgcaagcacttcactgggaagaccgtagctcttggcctaaccggacaggactttcattctttccattctcctggagctcacagtgcacctggaagatgcctttggccatgtttggtctgagttgtgagcaggatgttcaatgggacagctgggacttggggcagagatctgggctggaaatacaaaccggggagtcatcaacatagaggccatttgtacgttctgcatatgtgacacactatagaagatgatgtgtaatcatttttaaatttaaaagaaggcacagtgctacaaatgggtaattttgaatattggaactatggacatgtttttggaaaacccatctgttttcatgtttcttattttaactcgaatggggacttttattcagaggaggatttgatgtttatctgggcaggggaaggagggagaaaagggagaagattctgttgttgaagcacattggtgagtgaaggatgcctctgcctccccgcttcccattcacctatcaatcattgagagcagcctccagtcctgccccccttacccaggctttcacccactttttgccaggtaccagtacaccactttttgagtgaattcagtggctccccgtcagtctcctccttctcggtctctctgccctcagcttccctcttgccacactcacccgtgtcaccccccacctctttggctacgtgctcttgctccccttctccagtaacattcctccaagctctgatggaaatcctccatgctgcgtgtcccagtcactttgttccaacgcagtcttggagtccaggacttccatggctagctctaagctgatgatgctcatgttcatatttggagttcagctcttaccttgagcttcaggcctgggatccagctgtgccctgtgtggctccacagcagctcacactgctcatatccagccctgacctcatgtcaccccacagacctgtccttccttcctcctgcctagttcctgaatgtcagcatcctctagactccgctcaagcagaaaactcaaatgtcctctttcactgcttcttctttaattcccacacaatcctgtctaatcaacttgacctccttaacacctgttctgcctccctttttctgtctcctctgtcactgcaccatctctcctcattgagagtgccaggggaccctcatttcacccatctcccctctagagcttcacctgtgctgctacctcaaacaatctttcctgcctcgcgtggttcattaactgcccatcctcacggcagagggcagttcttccagaaagtctccagctcttctagaaagacttcccttaaccctgaagcttggactctctgactctgtagaagggttggcagatacttcttatcttagttgctggcctctgccagttggtagtggttgtccagaatgttggagtaagaaagattccaaggtacagtccatcttccactggaaggatggctgtcactattctttgctgctaatgtgtgcatctgatgcctgcactctgtcttttacagtcattatagtagactgtatttccatttactaaatattctagtttccatccccgcaggaagtacctggctgcactcagagtggccataggacatgctttggccattgaaagaaggtcagagtgatgtgtgtcacttctgggcagaaggttttgttttgttttttaagagacagaatctcaccgtgacaaccaggttggagtgcagtggtaccatcatagcccactacagccttgaactcctgggctcaagcaatcctgcctcagcctcctgcgtaactgggaccacaacacccagataattaaaatgttttctcagaaatagggtcttgctatgttgcccagactgatcaccacctcctgggctcaagtgatgctcctgtctcagcctcccaaagtgttggaactacaggtgtgagccactgtgcctggacagaagttttgtgagccaggatgtggtacactgtgtccctttccctctgccagaagactgacaatgtggagagaaacaactgggccccagggtgagaatgtagacccaggggtgattcctgatggacatgtagcatgaatggtaggggagggaaacactgtcaggggaagcttcactttgtttgttccatgttgtttgtacagcataatcaagcctgttctgactgatacataatatctccataaagtagtgtggtggcattttcggtattgcaaatcgtcagattcagggcagaaatcgatttgcctatttcagagtgtaccaagagccatttaattcattttacatgtccattttctgattctcagtaatttccacgtaagtcattttcttttaaggatggattatggtaaatcatatctaaggcacttaaatattgtaaaatctcaattataccgaggtcagggctgcaaactagggtggagaaatcatgaagtaatttccaagacctcaaacagcggaactaattgtcacacattccaaattccaaagctccaagacattattactcgataggcaccaattcagatactatttcattttagtcacatgagtttaataagcttagttatcaaattcctctgcccttagcagattaaaggctgccaattaggagaggtggattgtgaattctgttagaggcagttttactaaaaactgggagaagagaaagtctgaaaaaagaggagagacagagactttttgggattctaggtggcattctgtacatatcaacaggcagaggttctcagtgtgtgttttctaaagtgagaatgaacttgggtcatcaataaaaaaaagcttaattatgtgttgtaccctaacaagccaggctcatctcacacaaatttccataaaaagtcaaaacgagatcatgaacttggttttcagaaaaattactgactcatttatttagtgagcaaatatttattgttgactaaaatagacactgctaatcattggtggggggtctggggaggagacagtaactttccctgttctccaggagttcacagagatagaaaaataaataaatgtgacactgtgtcatatgttttactggaaatgaatatacagttggtgagatggaagctcagaagagagagaggcaaattcttggtgagggagggtggtaggttaagagacatcccttggaaaactaatggttctgctgagtgtagatgggtagttgagcagacaaccaaattgattgggattggtgttggggtgcagggagatctttcaggcagagaacattccctatgggtggcagtcataagagacatgactgaactcttcagcaaactggtatctgtctttgtcattggtttttagtttcactagaagtctgatttccagtaatttatttttatttttatttttgagtcagggtcttgctgtgtcacctaggctggagtgcagtggcacgatcatggctcactgcaacctccacctccctggcttaactcatccacccaccttggcttccaagtagctgggactacaggtgcacaccaccacacatgactaatttttgtatttttagtaaagatagggtttcaccatgttgctctggctggtctcaaattcctgagctcaagtgatcctcctgccttggcctcccaaagtgctgggattacaggtgtgagccaccatgcccgactagacactgatttctaatttgcaccttcagaaatgaaattctctatatcattcattggctgcagtgtttttaaagaataacttttatgtttgagaggaaacctatagggagcagctatagccatctggaaatagcatcaccttgtttgagttatagggtcttagcacaattgacagaaaaatgagaaatctgttatgtcattgatttctccttacacaaatcgtgcagttttggataagctaatatttttctgggatatttctaaacacttctagaaaagggctctatttcatgtgggcctaaatgataacaacacggagtcgaactctttaattcctatggaaattgtgaaaatgggcaacaaactgcattgcctagtctcttttgcttgttttctacattagtacaccaatacaacgccagattctcctggttgaaaacacacatatttatggatttttttttcaaagtacatcttatcaaagaagtactgtgaagacaaggaaaagtacagatacagcccattttaagaaaatcccaaatgaaaaaaatgcagatttccataaaagctcctcctgtatatctaaacatttttaaatgtttattcatgatatctgagagacttgcctgccctgccgagtgagatgtaaatgagaagtgcatatttttgcctcttttgtcctgttgccatgaggtcctacatttatatatattttcatagttgtgcatttatattagaacaaaactttactttaacacatatacacttcttaatatttatgtagaaaattgctttaatgtattaattaaatgagcttttgtatatatgttgttttatttctaattttaattttaatttttagagacaaggtcttactccgtcgctgaggctggagtacagtggcatgatcatagttcactgcagcctctaactcttgggctcaaatgatcctccagcctcagtctcccaagtagctgggaccatcggtgtgcaccactatgcttggctaattaagtttttttgtttgtttgttgtttgtagagacaggttctcattttgttgcccagactggtctcgaactcctggcttcaagcagtccttccgcctcggcttcccaaacttctgggattccaggcacgagccaccatacttggcctacgtgctgttttaaaacaaattaactgaaaatgcacaattggaaaaattccacatctctaaaacaatgagaagaaagtagctatgacttagtaaaatctcagaagggcattctacttttggaagaaatataaatgtttcaagattagcatgtgatggagcgtgagaaatataatgggtcctcacatgaaaatcaagcgagtttagaaggcaattctttcaaaatcgctggtaggtttgtcttccaagtggtattggttggtggctgggaagaagctattcaggcacagtgaatgtgacaagcccagtgacactaccataggctagaggaaatcagattggcataaccctttcacatttttccgcactaacccactggtctcttttctaaaaagcattcatgtgcaacagggctagccatgcgtaaactccccaccaagcttcctaatgagttgaccaagaaccatgaccagaccaggtggtaaagtcatgttgagtcttggcagcaaccgggttctctctgtgctagtgcgtatgcccctgtgctttggcttgaatgttgctggcaatggagcaggagggagaaggcaaggttatttcattcattcagtatttcttagacgtccatcctgaattctgtgaatttctaatttctggttgaactcttctactctctttagttttatttccctcaagagacttcattgttgctgttttttatttttatttttttattttttttttgggacagagtcttgctccgtcacccaggctgcagtgcagtggcacgatctcggctcactgcaacctctgcctcctgggatccttcctgggttcaagtgattcccatgcctcagcctccccagtagctaggattacaggctgagacttagttttaacattggccttttatatttgctctacccattcaatcttgtttattgagtatctactcagtgattgcagcgagagagaaacaaactatagactcttgcccataaaactgttacagtgtaactgaggaggcaagccatacagacataaagcaatctgtgaatgaggcaacaatgtatgtatagctgcattcaacactcaacgcataaaccacacactgtgaccacttgcggttaaatgaagggtgcagagaaatttgagaaagtctcaaagccactcccatctctctggactgcagaatttaatacccaatctgggaccacagtggctggtttatccagcaggtgattagggcctgaaaaaccagcttgtgctacccaaatacttgggaactgtgctggaaattcaggttatttatactagggtttttttcccaagatgacaattgtattagtcaggactctctggggacaaatgagagaagcccaggccataggctcttcagtaagaaaaggtacgctgcctctggaaggatgccagagtatctgttccagtcataggcagacctgtaagagtgtagcttcttccttcccaacttgcctttgcacatttgcacatttgtcacctaggctgcagtgcagtggcacaatcatggctcactgcaacctccacctcctgggctcaagtcatcctcttgcctcagcctcctaagtagctgggactacagctgcacgcaaccacgcctggctaatttttgtatttttagtagagacgggattttgccatgttgcccaggctgttctcgaactcctgagctcaagtgatcctcctgccttggcctcctctttgcacactggcgttattctctctcttccaccgaggacttctctgagaggagcggtatatagtggctgatgatcttagctaagtgactgcagtgcaaagagagagtttccttcttcaagcattgcaaaaatatttcagaaagaactcagacgggctcttttggttctcagtgtaccccttgaacagatcattgctacaaggaggtggggtgctgctactggggtggagggacatgatgagtgcccagaagaagggacaaaaacttcctggatagtcaaatacaacaactacacagtttcattttgaaagtccatttgtgaaatcaatttaaatcgactattgcttaccctggggtcatgctatgctgtccagcattttccctgataggccttcctaacttatttgtgtttctattctctaaagaatctttaaggcttttataccaaaggggctctgatggcatctggtaagtgtaaatgtttctcctcagcactgcgctcctgcttaatgaaacagtcaccaaagaaagggtgcattcaggtcaagtgcgctggcttacgcctgtaatcccagcactttggaaggctgagttgggtggatcaactgaggtcaggagttcgagaccagcctggccaacagggtgaaaccccgtctctaaaaaaattcaaaaattagccaggtgtggtggcaggcgcctgtaatcccagctatttgggaggctgaggcaagagaattgcttgaacctgagagctggaggttgcagtgagccgagaatatgccactgcattctagccttggtgacagagtgagactctgtctcaaaaaaaaaaaaaaaaaaatgcatccctcctgcatatcccataattttcccttcttaaataaatgtattttcaagtcctttgtgataagtacagtactttttccatccttgtgatagttcactggtataggatcaaaatgggcatcggaattaggtgaggaaatagcccattgctgagttggaccatttattccactctctctacacagtcttaattttttttttttttttttttttttttttttagtggtggtggggaacacttcaaacttacaaaaaattttcagtacactacaaagaacatttttattcctgaaatcacttgaaagtaagttgccagaatgatgtttcctcattgccaaatattttagtgtgtatttctcacaaacaaggcattctcttacataaccacattctaaccatccaaatcagaacactaatatttatttatcactgtgatctaatcctcagaccccattaaagttttgccacttgcccaaataaatattctttattgcaaaaggatccaatctagaatgatgccttgtactcaatcatcatgttccttcagtttccactaacctgcaagagttccttcgttgcttggtgactttcacgactcttttgaagcccagttaagttcctcagtttcggtttgggtgatgtttcttcatggttatattcaggttaggcatggttggcagggatttcatgaaaggggtgctatgttcttttcatggtatcctatcaggtggcaccaaacctggtgatgttcactttcatcatttgatgaaggtaattgacatgatgtatcctggacctcatcaaacttttaatttgctcatgtatttttatttttattggtatagacttcaatttcatattttattcaatgggttataatccatcactatcatgatttatttctatccttaagttgttccacacctggcccatgggagcccttatgagcaagtttccaggtccttatgacacaattccatcattctttgggtacatccttactttctggcacagtagagatgttccagacttatcttatatttttcctcccccatccctggaatcaatcacttctccgaggatgcttgattccttttagtgaagaacagtctttggaaaccaaccgtctagggacattaagtatgcttgttgctattggagtgtcattgctcctggaccttctcagtggacacagctaggaaatgtatgtgtttatatgtgtgtgttaaatatcaatttctttatctattataggtactattaaaaatgagttcccaccaatatctccaccttcagttttcccactaggagccatgatgagaaacctggctcctggttttttctatgtgtttacttatttgatcaaccctcctgtgcataacaagcctcacatccccatggctgactgcctttcccctgcttcccatgaaagcctttgtcatcctgtgccagctgctggagctccccacaactcaaatggtggccccattgattttaggccagcttagaaaaacacagtggaaaatttttgcatcatttgattatcaagtcatgattgcagtttgttggggttggaatgtgactattaaataataccagatcagccaggtgtggtggctcatgcctgtattcccagcactttgggaggtcgaggtgggtggatcacttgaggtcaggagttcgagaccagcctggccaacatggtgaaatactgtttgtactaaaaatacaaaaattagctaggcgtggtggtgcatgcctgtagacccagctacttgggaggctgaggcaggagaatggcttgaacccaggaggcagaggttaacagtgagctgagattgtgccatcacactccagcctgggcgagagtgatactccatctcaaaaaacaaaaaacaaacaaacaaaaaaaccagatcacattttaaaaatgacacctaccagaatatcaatatctgaataagccagaattagcactgttgggagggtatataatcattccatcaaagttgcatttactcaaacaggttggacacctccttctagatctgtttttagaaccactttccaagcccaatccagaaacccagccttgcttcttttccattgtagtcctagttaaaagcaaccagagctgcataaatctctgtgggaaaattatttttattacaatgatttatgtatatgcttatcttcccctctagtctgtgagaccctaagatccaaggctaacttcatattgtacagcatccaacagaatagttgttgaattattcaatgaatgaatcttgtctttgattcaattttctccagcttatatgccagagttagtcccaaatgactcagctgttcccaaaaatgaaattcgccctcaaagtatgaatatttaccacaattgagaagagtcaaaaatatatgtctcatgcacggaatgcaatatcaaaagaggaattttcacagagttttgagcagtctcaagatcacagaatatggatatcatatccaaagtatctatttagaaagtgatgacatgcttttgttgtatctatgtgttgtgctgttaagaaatcgctttcattactttatggtcagccatattttatatgcattataaattatgtgcttattacaaaatcacagccaccagaaccgtctctctatgctttacagttcacctgtgaagatttatgttctgagttagctgagacatcatagaattctcttcttaccaggaaaggatcataatacatgctgttcaaagcaatagcgtaagacttattgatatacagtatctatactccgcccctctctgaggattctatattggtcattgttcaaggcttctagtgattttcttttattatatgaaaaaggagagttcaatgtaggacagaggtggagctaccttgggtggtggggcagagtacaaagaacaaataatgatcttatatgtctgtgcacgtccttcctccaaatgtttctataactgcgatcttttgaaaattaacagccttggccatctcaaaggaggaaaaataaataaaggaatatgcagctcaatctgtgtgtttacggggcagataggtgaagatgagaaccatagatcttattgagagggaagctgcccacttttgtccttctatttgggtgagaagttgttgagcctccctatgtttatactgggagccctatttttataaagccctctgaaggctgtgtggtgttgccaacttggagaaaaggttgaagctccagtcctggatccacaaattctgtgtgcccactcttgagcaagttacttaagccctgtgagcctgagttttctcacttccaaaacaaggtcctcacacaggtgtgctgggaggtttagatgaaagcacctgccaaataaatcacagaaatgagagcctaccaaagatttgtgctccctgcattttatcttgtatttttttaaaatctcaagatggtggtactactgcctcttcacctcctcattttctttctttttctggtcttgccctgttatcccctccaccaggatgcacccaggacactttcccagatttgccatgtcccatgggaggctctggctatagttaatagagaaggtttccgagagagagaggctgagacagacacctggaaggaaaggttggatatctcctttggaggaaaagctagggaaagtcctaagaggagggcatttgctgtgccatttgtcatttagatctggaggtggtagaaatacagacattctgatgtttctataaaggctgtcagggcttaatgaagttcttcatggggcaggagccgcacgtgcttattaaggttggatcagtggatacactcatcccctggatctgggagcaaactggaatcaacagtgccaccaagtggcagccagctaataagcaagttgaaacactaagactgcaacttctagtgctttgcccaaatatctctgtctcttactctttttctttctaaaaataagatcaagtatattttcctagggtggatatagagagaatgatcttgtagacataccttcttctggcatgttgtagagcttggatacatgatttttctttattaaacaatcaaaacctttaaagtcccactcaaatgagcaggtcataggagtagatacctctgcatacgtgtatacaggtcatttataaaaactgagggatgggggctgtgtgtgttgggattcaagaagatttccaaagtgtattaaccaggagtgaaactcaggatgacaaatactgtacacgatggcaaacagcatagacaacatacacgactctatttaggagaggaaaccatttatattattacagtctgtaacctttttgttttttatttagagtatttctttttctgatcataaaagtgttcgttgtaataatttgaaaggcttattactttaaaaagaatacattctactggctgttaaacaccttgtaaataacacaaaataccaagatttttaggatacagaaaaatccatttcattctggtccatttgtttgtcattagaaagagtctattttgtactcatgctgctgtgttcattttaggactaatttgaggtaagcttccagctttgattgttgctttccccattatttttattttcgatcccccatagaatgcatttccatcttccaatctcctcctcccgtccattctgcacacaacccagctttcagaataatctggtattgagagtcaatccgtgctctggaaggtgtctcagtgtccctgtgacagccagctctgcagtatccatcggacttgatatggtggctcttgtagtgttgcttttctaagagctaaagtactttctcgtggtcatgaatagtgtgggaagcccatagctcgggctgttgaaaggtctatcagttctgctgtgcctgacaatgttgaccccagggtagagagatttcctcccacttcctaggtgtgtgggaggtaggggcaagtgctaggggatttatgaatgagatggaagggaggacagaaaatgaagaagggaaaaagatatcaggaaccaacagaccatcagctgaattctaactacaaaaatgacaaataacaaaagcaatttatttatttatttatttatttttatttttattttttttgagatgaagtcttgctctgtcgcccaggctggagtgcagtggtgccatctcggctcactgcaagctccacctcccaggttcacgccattctcctgcctcagcctcccgagtagctgggactacaggcacctgccaccatgcctggctaattttttgtacttttagtagagatggggtttcaccatgttgttagccaggatggtctctatctcctgaccttgtgacccacccgcttcagccttccaaagtgctgggattacaggcgtgagccactgcgcccggccagcaaaagcaatttaaaatgtaccttgctccataataaatataagggagtgaggaacaaagcttttcttcccccaattcctttgattttttattttttttgaagaaaagtagattaagcatgagttttaagtactgttcagaataaaaaccaagatagaccccaataacttaccttaattttgagtataatattatattgtaggtcatttctggacttgggtggctatttttaaacatatttttaaattgtggtaagatatacgtaacataaaggttaccattttaacaatttttaagtggacagttcagtggcagtatgtatattcacatttttgtgcaaatgtatgtttctagaactttttcgtcttccccaactgaaactccacatccatgaaacactaaccccccatttccccctccgtcatcttactttctgtctctggccatttgtctatcttctttggagaaatatccattcaagtcctttgcctagtttctgtctctatgaatttgactactctagggccaaatataagtgggctcatataagtatttgtccttttgtgactggctgatttcaattataatgtcctcaagtttcatccatgttgtagtatgcatcagaatttctttcctttttaaggttgaatagtagctgatcatatgtgtatatcacattctgttttctgattcattcattgatggacacgtgggttgcttctgccttttatctgttgtggtcaacgctgctatgaccatggatgtataaatatttgcttgagttcccactttagtttttttttggttatatgcccacaagtagaattgttgggttgtgtggtaattcttttttttttttttttttttttttttttttgaaactgagtctctctctgttgcccagactggagtgcagtggcacgatctcggctcactgcaacctctgcctctcaggttcaagcgattctcctgcctcagccttctgagtagctgggattacaggtgtgcaccaccatgcctggctaatttttttgtatttttagtagagatggggttttgccatgttggccaagccagtcttgaacccctaatctcaggtgatccaccctcctcggcctcctaaagtgctgggattacaggtgtaagccaccgtgcctggttggtaattctatgtttaattttttgaggaattgctatacagttttttttgtaatagctgtaccattttacattaccgctgataatgcataaaagttccaatttctccacatcctcaccaagaccctgttattttcctcctgttttaaaatcatgaccatcgtaatgtgtgtgcagtcgtatctcattgtggttttgatttgcatttccctaatgattcttgatgtagaacatctttcatacgtgcttcttggtcatttgtctattttctttgaagaaatatctgttcaaatcctctgcccttttttaaatggggttgttcgttattttgttgttgagttgtagttttttatattctggataccaatcccttattagatatgtgatttgcaagtattttctgagagtagttaaattcaagtggactgacgatttaaatggttgatgccctagcttgagaaaatcaagcatcctgtgatatgactgcaattgttgaagctaagagttgaggaaaatgagggcctccctctagacagatcatccacgctgcagaccggtggccaacctctcacttttgggcaactgcatcgtgcttctggaaggatttggctcagcaaggacaaagcaacccctgtcacctcactgtggcaggttggtgatgtgaaatcattgctatcaggtgtagcatcacagccaaggtcactgccagagagccaggtaatcaaatagtggtggagcccctcttaggtcgtgttgtttcaggatactgaagaggaaaaataagctcttcatttacagcttctcccattatcagcaagtgaccctctcagtccgtctccagccattttaaagaagcaaagaaactactgggcttttgggaggatttgccctcagcgttttaaatgttggcttgctgggccgttcttgggtttgtagcacaaaatattaccattgtgtttccaccgtgggtttgccattcttgtttcagaagagaaatatttctttcatctactttcttctttctggttattgttcttctttttaaaaaaataattctgggctgggtgtcgtggctcacacctgcaatcttagcactttgggaggccaaggcaagtggatcgcttgagctcaggagtttgagaccagcttgggcaacatggtgaaacccccacctctactaaaaatacaaaaaattagctgggcatggtggtacatgcctgtagttccagctactcgggtggctgatgtgggaggatggcttgagctcaggagttcaaagctgcagtgaggtgagatctcgccactgtactccagcctgggcaacagagtgagaccctgtctcaacaacaacaacaacaacaacaacaaaaatatatatatctatatggccaggtgcagtggctcacgcctataatcccagcactttgggaggccgaggcaggcggatcatgaggtcaggagatcaagatcatcctggctaacacagtgaaaccccgtctctactgaaagtacaaaaaaattagccgagcttggtggtgtgcacctgcagtcccagctactagggaggctgaggcaggagaatcgcttgaacccaggaggaagaggttgcagtgagccaagatcaccactgcactccagcctgggcaacagagcgagactctgactcaaaaaaaaaaaaaagaaaaaaattcagaaagaagttcaatgaggagcagcattttacaagagatgtacaatataatcatctctcatttgacagcatcctctgtgaagtggatgatattagtttctaggaatcccatagaagccaatggcaggatttctgcctgtgatgaactttcagcctcctgaagcctagatctaaagagacttaaagatgtgtagagtaaacatatgggtaggcacaagcagatacagttaaaatgatagaagttcatgctgaggcacatggaccgacatggtacttaggcctagggtggggagaggtcctgaaagggtgaggatttgaaacagaattttgaaagaagggaataatgtggcttggcataaaagcaaaatgataactatagtaggtatttcttttttttttgagacggagtctcactctgtcgcccaggctggagtgcagtggcatgatctcggctcactgcaacctccacctcccggattcacgccatcctcctgcctcagcctcctgagtagctgggactacaggcacccgccaccacgtccggctaatttttttgtatttttagtagagacggggtttcaccgtgttagccaggatggtcttgatctcctgacctcgtgatctgcccatcttggcctcccaaagtgctgggattacaggcgtgagccaccgcccctggctatagtaggcatttcatagcattcatctcctctctcttccttttagccatgtatgttaacaggttgcctagaaatacattaggtatgagatttgtttttctttgggagtagggagcagtggggaaaagaaagcagtaatatgattgaaataaagacttttttttttttttttttttgacgacagagtcttgctctgtcacccaggctagagtgtactggtgcattctaggctcactgcaacctccacctcccaggttcaagtgattatcctgtcttggcctcctgagtagctcggattacaagtgcgtgccaccaagcctgcctaatttttgtgtttttagtagagatggggtttcaccacgttggccaggttggtcttgaactcctgacctcaagtgatccacctgccttggcctcccaaagtgctgggattacaggcatgagccaccgtgtctggctttttttttttttgagacagggtctcactctgttgcccaggctggagtgcagtggtgcaatcatggctcactgtagcctcaaactcctgggctcaaccgatccccctgcttcagcctcctaaagtgctgggattacagatgtgaactactgcgccctgatgaatgaagacatttttccagggttggggagtacacacttcttgagtggtcctagcaggccttctcaaacactggtccctctttgtaggccatgcaacctgtcccatcctctgtcccagcacagagttggcactggtggagccctgtgctgtggctgcttctctctctctccctttttctttttctgagacagagtcatagtctattgcccaggctgttgtacagtggcatgatctcgactcactgcaacctccacctcctgggtttaagcaattctcatgcctcagcctcccaagtagctaggattgcaggtgcctgccaccacgcctggctaacttttgtatttttagtagagacggagttttatcatgttggccatgctggtctcgaactcctaacctcaagttatccaccggcctcagcctcccaaagtactgggattacagccatgagccactgcacctggctggcttctctcttgactcactgagtctgtcacttgaatagagatgaccaacaactgagccctgagctgctggtggggactggcctggatccccctgggcatacccttcctgtgctccgcactctgtcctttgtttttcctgtgtggcagccgacagccccgtggcctgtatgacctctatacactatgcctgttagttgccctaccacttgttccagaagattttgttggtggctcctgataaaagtggcacctctcatgtagtggctgaataggggacccaacagacatgtccacctacaacctcagaatgtgaccctctttggagtaagagtctcgggagatgtacatatggtatggaacttgagataagcacgtgctggctttgggtgggccctaaatccaatgacattataaaagacggaactggaaaagaggtatacagatgcagaagggagggctatgaggagactaagatagggattgaagtgacctgtctgtaagccaaggagagccaagggctgcagccactgggagctgcagagagcatggaaccgattctctttcagaacctcctgaaaaaaaaaccaatgggccaggcacggtggctcatacctgtaatcccagcattttgggaggttgaggtgggtggatcactggaagtcaggagttaaagaccagcctggccaacatggtgaaaccccatctctactaaaacacaaaaattagctgggtgtggtggcaggcacctgtagtcccaactattcagtagactgaggcatgagaattgcttgaacccaggagacagaggctgcagtgagccaagattgcaccactgcactccagcctgggcagcaaagtgagactccatctcaaaaaaaagacaaaatcaaaaacaaaaagcccaacactattgtaactttgattttggacctctgatctttggaactgcaaaagaataaatttctgttgttttaagccaccaaatttatggtaattctttatggcagccctagtaaaccaatcctggatgaatcctggagatcccagttcagtcactttcagtcattagaatcacctggagaacatttaaaaagaacagccactgcattagagtctctgagggctgagttaagggattaatatttttaaaagtgtcctaggtgattgtaatgtacagcctgggttctgaaccacagatctttgccagatgtcccattttgcagataagaaaaccaagactcagcaaaattgctttatggtccagagaaaaatttgaaaagtccttttgtagggctttgaaaggggaaaaacaactcactcgaggacaaaggagtgtgtgtgtaaattaaaattttagaaaaaaattcatttttgggttttgtgggtggtaatgactaagaaaagggaggaagaattcatcttctaatatttttcagggaccttccaccatacccgttttttatttttaaaaataataataatattatttaaaaattataataatattaaaaataaaatattattattatttattgtttagagacagagtgtcactgtcacccaggctggagtgcagtgggccatcatgactcactttagcctcaagctcctgggctcaagtgatcctcctgacttagcctcctaagcagctgggctacaggcacacgccaccacacctggctccttttttttttgtagaggcagagtgttgctatgttgcctgggctggttttgaactcctggcctcaagagatcctcccacctcagtctcccaaagtgttggggttacaggtgtgagccactgccatcttggcctaaatcatttctaaaagttgatttgttcatgtgtacaataaaagaaatgttttccttcttagacatgtatgccagtttaaaatagttatgattttcattgccacctcaataaagactccgtttccttatcccctgaagaaattcaagcacagcctagatttctgtacagaaaaggagatgaataattgtgtttgaggtcttgttgtgggtaagcattttggtaaataacatagaagatttaatgttcagagtaatttttttttaagtgtgtcttggtttcagggatgtggtattaaatctaatcgcccacttaggttatctgtcctttggagactcacgaagctaagggcaactggatagttaggatattatgtactctttaaaacagcatgatttagtccaagtaggaattgctggggctctaaattaatctcctggggaacaaatgaaaaaatacatacgtgatatattattgaggtagtatatattttggtgctttgatatcttggagagtcttacattaatctgtcattaattttaaccagggcaatctgacagtgattaaagcatatctagataatcagaagctaaagaagcccactgagagatttacttaaatgatctaatcagcttttcttttcatagcagacacaaaactgaggtcctgacgactcaagggcattaacaatcctagagcactttccataacagtccgggtatttagccccagtgtcctggccaaattccaactcaagtaatgctattttgcctcccgaaaagtccccctgcagctactagtggatacagtattattctttccttcctgtcccgaagtgtgaggctttgtgtggaggtgacaccgtgtgctgcaaatcagatgcttcatttctattatgagtggctgcattctggctccaggggcgcagtccctaagccgctgtaagtacatgataggggatatttacatgacttgcgctatcaggggaaaattgcagaagacttattcttttaaaaaacttgttttaatcttctgtaaaagacaatgttgtgattaatataattagatacagttagataatgatcagatgaatacaataataatgtacatgtttgtctctgtgctttgttttgttctatagaaggttagaaacagtgatccttagcaatgagatttctatcctcaccctggtctataccaggttgtatgaaaatgtgtaacatgaaccatttctcagtttgtgagaaaaatctacataaagatttttaaatgctccaaagtgcagaatgcttcaatgtggaaggatgaagagattcaggatgccctggttaatgggcccgagactcattgagaaaactgggattcagggagcaggagagtgattctcctggcgggcgctgtggtgtcaaaacagccaacctggacagcttgacaaactatttctggaatcctgtttcttgaaacaatctgttcacttagaggggaaatttccaagtgctctactggctgtggtttatgtgacatggtgcatgggagaacaatgccatgaggaagaattgtgtgcctgccataaacggccccatttcatttctttcttgagagattatgaaaaacgaagggagaacttctcaaggggcctaagggcaaccagcgcagaaagctgggagcaaagtgggttccatgcaaactcgaaaatagttatgatgggccaggtgtggtggctcatgactgtaatcccaacactttgggaggataaggcaggaggatcacctgagcccaggagttcaagaccagcctgggccacatagtgagacactgtctctacaaaaaatataaaaagtatccaggtgtggtggcatgtgcctgtagtcccagctactcgggagagtgagatgggaggattgcttgagtccaggagtttgagtctgcagtgagccgtgatcttgccacttgtacactgtagtctgggtgacagagtgagaatcagtcttaaacaacaacaacaacaataacaacaaacatgatgaagatgagacaatgtaataagcatcggaggaatactccaaatatttcaagctttaaaaattgaaatttacagcaaactaggtaattagactatttagatattcaagctttccttctccctatttccttctttgacattagtcaggactttttggttgcaggtgacagaaactcaacaccaactacctagagcagaaaagagggtgtactggcttagtagctgacagctgaaaagaccagagcccatgggtccggggtctatggtcaggtgtcacctcctctccctcttagctcttctctaggtagcttctttcctcgtggtgacaagatgacattttgcagcttcaggcttacatccaagccatctcaggggaaagaatgttcctccccccatagtttgattgaaagctccaaggttatttggctgggcctgattctagtcacacggccatccctgtagccaggagagtacaaactgagggagtaggggttgaaacagccccatgcaaaccaaaaggactggtgtatttcaaaggggaaatcaagttgatgccatcagaaggaaggatatggctgctggccccaaaatacagatgtctgttactgacatataaattaaacctgtttattgaaaagtgctgacaaatgcttttttaactttataaaagtgttcaacacatttgactaaaaccatgtaattaatatctgtaaaaagaaggaaaaaatgtaaagtgtagaatcatggagctgacctcctagccttttttcccacctagtagagaaattcacaatttcagtgttcctactaagaagtatttcaacttccatttgagttcctctaggcatgttgtatttattacttcatagggaagtatattacatttttttttctttgagacggcatcttgttgtcacccaggctggagtgcatggtgcagtcacggctcactgcagccttgacctcctgcgctcaagtgatcctcctgcctcagcctcctgagtagctggaaccacaggttcgccaccatgcccagctgatgttttaatttttttttggtagagacaagttctcattatgttgcccaggctggtcttgaattcttgggctcaagcgatctgcctgcctcagcctcccaaagtgctgggattataggagccaccgtgcctagcctgtattccattttaataggaaggtgttctctctcagattaagctgagaggtccccccttctcccttgcctttgttctaatggtctgttttctgccttttggagttacatgaaataaatgtaatctttccaagatctcctttgttcttttcaaagtctaatttgttttttggcatacataactgtttctcttacttgttcccttcttgttctcctccctcctcctgctttctcttttttatgatataaagaaagcttataatccaatttcatgacaatcgttggacatgtaattcctttttaaaagtttctcttgtttcttaatgaattacagtttgaaggctcaatttaaagtgtttatcacaaaactgaatttttaaacagcactctccagcatttatgtatttcactttaaaagttaaattatttcggctgggcgcggtggctcacacctgtaatctcagcactttgggaggccgaggtgggcggatcacaaggtcaggagatcgagaccatcctggctaacacggtgaaaccccatctctactataaataccaaaattagccgggcgtggtggcgggcgcctgtagtcccagctactcgggaggctgaggcaggggaatggcgtgaacccgggaggcggagctttcagtgagtggagatcgcgccactgcactacagcctgggcaacacagcaagactctgtctcaaaaaaaaaaaaaaaaaaagttaaattatttcaggaaacaaaggtctttaagcatcttttgtgtcctaagtattctatgagatggagcaactgaacatgatgctaaaagttcttaagtgtccttaaatagcccatgagtataaatattcagttaaatagaaaaaccgcagaacaatgtaagaaaatcgatgtaagagaacaatgattttgtagatgggaattaagattctaatatgcatttgacccagtaaatgaactcttaagaagggatgtctcattgctctctcttgtattgctgtgttttaagcaatggtaaatctaagcaaagaatattacaatcttagctttttaaagcaaattcggaggcttaaaataaaactccattattaatgattctctgtttgctttggccattgacatttctggatcagtcttgttttcctttagttaaatatcttagacatatttgttttaaagaaggtgtgtatcatttcatttcctggtttttccattttaaatcgtgtcttgtgtactcactacattttgtttacttcttaacttttattttttaatcattagcatgaaaaacattttatcaacaacgaattgctatcatctttataagaaatagagaattttattcagttatttaggtggtgattaccgtattcatgaaaaattcaccaataattaacattttttttcaacaactgcaacattcctatcctatgtcgggtctgtaaaagtatgtggaagaggaaattgaacagctttaagaagcatatattcttacaagttaggaaggagaagcagggaagaggttaatgagttctctaagcccatgagaatggagggaggtggcccaactcacaggtctgtacttcactctctcttccatttccatccagcttatgctcatatggaaagactgatggatgctgagttggcagaactattagtctaagaggagggtgaattgaggatggaggtgtagaaggataaagagaggacagctaacacgtaaccaggttgaagagaggtgtgcagctgctggtggtaagactagaaaggttgcctgtcagatgcaatttctgttgaaacccatcaccctccctttgttaatgttcttaacctggtgcaatttctcttccagggactgttccaggaaagatgtgccagatggagtgatagggttgcagggagggtgatgcaccattactagccccatctgctcacagcccctggggcttttcagctgcaggattaaagactaatatagagtggcagctgccgaaggggcaatcctcatacatagcaggtgctcaataaatgccactggctttgtgtgaagatgctagaggtggatgtgacaggttttgcattaagaatcatgagttaagacattaatgtgttttagcacagtttctacctgcatttcagaagtaaacaagtttcttccttcacaccttctttcttctgaaacaaatgtcccctgagctgctaagtgcttaattcattttcggcactgtgggtggaaaaactatcatatattccctgtttttctatgaagtcaagactgggtacctaattttttcctccctcacacttactttcctttttatcatctcaaattctcccagagtattgcaaagtgtgaagaagacaaaacaacagttttattcatttgtgggttaaacaaagtgtgttcatcagaaaactgtgatcaagctcatgacttaaatacaaaacaaacctgaaagactgctgtattccttgtaactaaggcatatgctgtggggtcagatttttcttttcacccaaaggagatttttttcatttgttccttacacccatttccatgtttataaagaatctttttttgcaatgctatcaagaagaaaatcttattgttcagtaaaaggtcacgatgcctcattattgggcagactcaggtatatatggagaactacttatattaaatatgtattccaacacaccttccctaaaaccagttacaatacccttcactcttcttatttcttgcttcctttttttctatctcattcttaaatattttttttttcctgcttgtccaaaccacctaatttcctttctcagattgctttttatgatctgtctgtaagtctttatggcacctctcaccatagatctcagtttaatagtatctctgttaattatcctatctttaagacacaatgggttggtttttcagaatcaaatttacattgcatttctaattatggacatctacagttaattgtttcattttgatatggtaaaaacatggcttgtactatttttcaaaatagtaattagaaatgcatctcctgacactgttacttttaaaacaccaacaacacttaataaaggagcaacatacatttaattaggaaaagctaatagaaactttcagttgcttttaaatggttaataaaacgagacttgtaaagggaattgtatatattgctcattttttctgaaggttgagttagagccctaccaactgagtgtgggatcatgagttttctttttccacatccttggccattgtgtttacttttattgtggttgtcaacctggattgttttctgggaaggcaacaccctcactagataaaaatcaaagcttatctgggctttgcagtgaaatcctaaaacattataaaagttttcaaagaagtgaacaaatctgtggaaatcaaaaaggaaatatgtatgtatttttagaaaattcatttgaattcaatttttttgacgttaactctatatttaagtatgtgctgtgtttctattttaagtctcctctactgctgtgattatttaaacaacagacacagcaaaacaaaatcaaacaaaaacccctgagtaaaaagaagccttaactccagaaagcttttctgagacagggtctccctctgttgcccaggctggagtacagtggcgcgatctcagttcattgcaacctctgcctcccgggctcaagcaatcctccttcctcagccttcctggtagctaggaacccaggcacatgtcaccacactctgctaattttttttgtttatatttatatttatatttatttatttgtttatttattttttgagatgtactcttgctctgtcgcccaggctggagtgcagtggcgtgaccttggctcactacaagctccgcctcccgggttcacgccattctccttcctcagcttcccaagtagctggggccacattttgaaaattttttgtagaactggggtttcaccatgttgctgaggccagtctcagactcctcaactcaagagatctgcctgcctctgcctcccaaagtgctaggattacaggtgtgagccaccacatccagccaactccagagatctttaaaagcattcctgttctgcagtgagaatcagaagaaaaatataaccactgttgatttgctacatgtgaatagaaaacttgggtgatttctgtcatgtttccatggatttcattaaagagggatttcagctccatgttgtttattatgacttgttaaatttgactaactgttcgaatgtgagtctcaaatagtaggcatctcgtgactattagtgattaactattaattgggaacttagagcattaagtatcatagaaggcagaagatgcagcccatgtccttgatggtgatcatggaatgatctctgagcattgccatgaatatgacaagtgagcacgtgggcctctagggaggtcagaagcacagctgacaggtatgggggagcaagatcggaactgcgtgtgcatggggttaagagggccatttaagtgccaggggtcttgctgtgtgtgttttcagtcctctgagcaatggagcacccgcagttatgttgcaggcatccccatgctgatatcactttggccttcatataactgaggccaacccccaacccctgcaacctttatttctattgcctcatcttttgcatactcaacttcccctccaggtctcctctgtagcaaaatcactcttctagatttatcttgtagcccacagcttggccgctcgtgtccttctctgttctcttttatgggtacactcgtctgtagactcaaatgcttaaaacattaaaaaaaaattgatatcacagcattgttaccttccagagaccacatttcaagccccagtgctggtgtgttgtagtaggaatgtctagactggtgcagaactgagagggttgatctcattctaggtccttcagatagggaaacaaaaggaatggagtttctttctttccttttttttttagagacaggatctcactctgtcacccaggctggaatacagtggtgcaatcatggttcactgcagccttgatctcctgggctcaagcgatcctcctgtctcagcatctggtgtagctgggaccacaggtgcacacaactatgcccagctaattttatttttatttttattttttattttttaattttttttgtagagacagggtttctctatgttgcccaggctgatctcaaactcctgggctcaagtaattctcccacctccgcctcccaaagtgctgggattacaggcgagagccactacaccagccaggaacagagttctctaacagcacccctaggcatacataacagttttcatttaaaatatcatctctttctacctcattgtttttttcttctttcccctccccttaacttctgcagtctctcacgctgtgatgtgtgagttgtgaaagagttttcttagctcagttgctaagaatttagctgtattgatttgtcccattgcacctgctgaaatgctaaaaacttggcacataaaatataagtcagactgataaaattaaacttcacaagatatgcagctgctgtgtacacacagaacacgactagaatcttcaccactgactgcttagatattctagttttacatctttgctcttttcatcgggtttgcattgtgcgtgttgggcagtaggaaatttcaggattaccatttcagcctgcagaagcagacatgtgagtcatctagctctgtgcttgcatctatagcttatgttaacctaaagtgcagcaatgtacaaattattgtctctaggacagtgttgtagctttaagtacagaggtgacccaagtacaatcactgcaggggagaaacccctgccaagcagtcatattatttaggtggctcagtccttatccactctgtgaggctgaggaggtcacaaccacttttagggataaaaacatcatttaaaggaagaacttattagcatgcttcttttttcccagggtctctgaattttcttttatggccatgatatctgcagtgctgagatacagttgtgctcatcccaacgtcagataagtttaggtagatgaacttaagacaatgctatttatatttatatttatatatgtataaaatatatgatgtaatatgtgatatataatatataatgtaatatatgatatatcatatatgatgtaatatatgatatatcatatatcatgtaatatacgatatatatcatacaccatgcaatatatgatacgtatcatgtaccatgtaatatatgatatatgatataaaacataaatctgacccatatattatgtaacatattacatatcacataatatgtaatatattacatatcacataatatgtaatatgttacatatcacataatatgtaatatgttacatatcacataatatgtaatatatcacaatatataatgccacatctctctatattatatgatctataataatacatcatatgatatatataatacatataagaacatgtatcatatataaaaaaggggacatgctcccctttttatgaggacaccagttgtattggattaaggcccaccctaatgacctctatttagtttggttaaatttgcaaagaccctatttccaaataaggtcacgtttccaggcacctggtgttaggacttcaacaaatctttctcgggggcacagttcaacccttaatagccagtaaggctgacagtaagagaaccaaaggagcatggcactccagaagccaagtgaagagtgtgctttaggcaggaaggatggataaactgaatcagatgctgctgactgagcaaataggatgagaactgaagattgacggttggattgagcaatgcagaggttgtgatcacccttggagtgagtcgtttcagcttaggggtaaggatgagaattagattgaaatggaagagagaatggaaacagaggagttagagaaggcaagcatagagaggtttttgaagagttttgcatacagggaagagaaaaatgggaggtggcagaggaggaaccagtgttccaggggatttttaaaaaaaatgagataaataaaaccattttaaaatatatgagccagtagagggggaaaatattacaggaaaaggagacagtttgtagagtgatgtctttgagtaggcaagagggtgtacgatataatagctgtgcagaataaggctggtttaacaagcaatccagatgattctgatacacgctcaagtttgagaaccaccattccaggtaatctctaggactctctaaaattctgtgccttgtgatgacttttaccccattagctgaaaatgaaaccccctcttttgttttgaatgttgatactgcctaatgtatatgaagaatgagtcgagatggaatgtgaccacatgtattacaggcagatgtgctgtggggagtggtagctctccatctgtgctttacactgagaggcttaatcagctgtactgtctctttaaactataacttctgtcatttagaagcacctcttcatcattgcctgggagatctggctgcatctccagctgctattttttagatgaccgggcattaaaccctagcatagtgaagagagtgtcacagggacttaaaatatttgtatttggcagaacccaaaggctgtatgacaaattaatgtctcagtaccccaatgctattgtatcaaattgttgtatatcaagtttccttaaaatatgacctagtattttcattgaaaccttcccaaagaaggatccccagtttggagtgtctggccatcttatgactttattttgttcctcataaattggagctgtagattggcattatcactgtaagataaccttaattctaaaactcacagttaacaaaatggccacactttctttctcaagtcaattaaagttgattttaattttcctaatgttacatgactgaaaaaagttgagacaatggaaagagttttaatcaacgcagtaaataacctgagttttaataaaataacttggtgtgaacaaatgtttggctggcacagagcattatgcttttccagctgttaaaattaatttgagaatatttattttgctttatttggtagaaagtataaggttgttaacgttgtatattcaagaggtcattccccttcctcccctttgaagtagtcacaaagtatttgaagtgccttttgatactagaaagtgatttccctagtttctctgaacatatctaaggaaatttggaatgagacttgccctttagtattctgggattttgttaattgtccatctgttaatgtcaatgttaacattttcatcctggaactttcactcagcatccaacagatagagtgcctgtgcccagcacaagtggtgcagaccatacggagtgcctgggttggtggaatggcacccagaaaataacatctgtaattcatacaacatgataagagcaatgacagacgcaggtgcagggtgcttaggctgaacaagtgaggggggcttcaccccgactgctgggggtggtggttaatagtaagcttgataaatgggggtgagtgatagtaaagcctgtctaatatgtaatcttttaaatcatttataataacatggattataatctttcatgttttaatatttaattacttttatacccatctgttttatcatcacaaacacccaatatataggcagatcaagaaagaaaatcaaggcttagaacctttgacctgctcaactttacacaattagtaggagccaaacctaatactcagcacatctgaatcctggtctaaatgttttgtacctatagttaaggaaatgaactatgattgatttcagaattggttctgaaatgaactaaattatatactagaccaatttacagttcagcagtaatttaaaggatgtttgaaatgtctttaagttcccttgaaattgtgaacctttacatgcaactctgatattataattgggaacttttaagaaagtttagcttgagattgatgactgagacaattttgtatttaatgttgcatttgataaacatgccattaaataatgttgtttcttttacaagttgtttttttttaatacactacaaaactttatctacactgtcattgtttccaaagtagaaggttttggcttataggttttcaacttgttctttttctttcctttttttctccatattttaaagccttatatttataagaaattgaagctgttttgtgtgtgtttgaaatttttttgtttgcttaatttaaaacttgcagtgaaagttgatctaatggaacagtttaatgccaagtttagcttaaagcaccttccaaaagtccaaaagagcaagaatggattatatctatgctctccttggccagggagaatgctatgctctcaggactgcaggcagaatgcaaggacacaagtctagcatgtctgaactaaccctggctcctgaccaaaatgaaaagacccagtgaacaatggcactggtagccacattccaaaacccctggaatgaaagttattcacattgatagtagctgttagtagtatcatttctgagaaaacatgctgagctgattgcaactggctgtaaaaatgacatgaaatttgccctgttttcaaagtgatgtatctctcagaaaaaatagatggaaagtcagaactttcccttttgatggtggagtaagctggtgttcacgattatatgatttactgatgaaattcggaaatgcaaaaataagtctggctttaaatatccttttcatgtcatgttaagttatgaataaattaacagatcagggccaggtgcagtggctcactttgggagaccaaggcgggctgatggcttgagctcaggagtttgagaccagcctgggcaacatggcaaaattctgtctctataaaaaatatacaaaaaatacaaaaataagctgggtgtgctggtgcgctcctgtagtcccagctgttcaggaagctgaggtgggaggattgctcgagcctcggaggcagaggttgccgtgagccaagttcacgctactgcactccagcctgggcgacagagccagaccccgtctcaaaaaaaaaaaaaaaaaaaaaaaaaggaatttcattggctattaggtatcatttagattcttaacagaatttcagatttgaaaactagtttgtagtaacctttacctctagtgacacacagttaagataaaggtcccaaatggtttttctcggtgttgcttggtgtttctttgatatgtgcaaggtccctttgatgcctgttttccacatcttgcttttttgttttacctgagatgctgcatctccctgctattaatactacttacacacattactctgccttaccgccaaaagtcaaagagcaacccttcccgggagactgttctcccaaccaggtgtcatctcccttttctctgaaaccccatataacctctctgttattttaaataagattttagatgtgaaagcccggcataagatctgggacataggcacccagaaatctcagcttaaccacttgttttatcttattttgtggccacttgtatatatgactattttgcttttggcatttaatggagtaaacttgacttttctacctgtttttttaaataatactttatttgataaatatatcatatatgcaaaaagctttaaattgaatgcacagtttaaagaatcataaaatgagcacttttgtctttgactccgagcttaagaaagggattagctgtactgcatggagccctccctgaccacacctcctccctcctggatgaaccaccatcctgaattttgtggttataatttccttgctttcttttatagttaatctgcatgtggacgattttgtgatttgctttctttctcgcagtattttgcttttgagatgcatccatacagctttaatgttgcaatccatcactgctgtcaatttcactgttgtgtaatattctaatgtagaatatatcgagttcttttgacatgacaatatgggtgtacatgtgcaagagttccaactctagaagatatacctaggagtggattggctcgttctctatgcatgttcaacatttctaggatgtgatgctattttgtgtttcaaaatggttgtactaaaattatcctcccactggctacatatactgattccttctccaaaaccttttcctactgcttttaaagttccgggaggacagtcagtctatctttttttgcaggtccagcttttaacagggaactttgcgcaaatttagtaactcctgattgtctgattcattatttggttgaattaaagaattgaataagtttccccattctctttgaagtactctatattaggttttatgaacaagagagagggctgtgtaggagaaagcccataaattgcaatcagggatctgggtgtgagttctataacctcctcctaccttgcaaaacctaatagcttcatgatggcaaaatattctctaccgttaaaagcagataatcatcctacatcatgatgcagagacatctgacctagtgtctagcctgtgtcagagctcagcaagtactagttgctctttctatttcactctactctaatgttaaggcaggactctgaatatagttcactggtctgcattgggatgaacctcccagagacaactaaagcctcaggacaaacaaagcatttgcccgtgtagcctcagggcagcccagagccaagatactctggctgattttaatgtgtgcttcgctgtggtgcatccacttggagtcattccggatcatttcttttcattctcacgcgggagccccctgaacaccctcatcggcatggtggctacacttgatgctaatttggctggattatctgcgctacaggcttgtcacggagttgggtggcaggagttgtgtaaattgcagtttatctaacacagactttgtgccagacatgttcaacactttacagatattaattcaattctgtgaggtacacactgttattattgccattttagggatgacagaaccgagacacagaggttaaataacatccccaagtggcatagctggtgggtgatagagccaggatgtggttacatgcagaatggtaaccttaaagtagcaaaacaggtgggtgggttttcatttatgtcacacgatcatttggtggcctgatctttgtgtgtcaatacagcattgacaccaaagttaaaagatctgtggctttgatgccacagaccctctgcctccagacctatttcctttggggtgcgtgaattagccgatttagaaatttcttgttagctgaatatttccctctttacaatgtctcttggtctcagagaattcttcccagtacttaaaactgtaaatattttctctgaaattatagattttaaaagatttgcttggactttttccaatttcatagtcctagctcaaggttataacttgttacaatgcttctgaaaaaattaagaaagcataaggttgtaaaactttttaatagcagaagcttaaaagaattctcagtatcaacaactcccccagatataatgaactatggtggttttgaaactaactggatacattttcttcttcagggtagaagttcatctccctcttaacagaaacagaactttcatcagttctgcccagaagtaagaacgctttaaaaacaactttattttctaaagtaatactaaagcattgaaatctgtctttgtgtttatattagcacttatcttgcagtgcctgggtaattaactctcaagtttcatgaaattgaaaaatttgggcatttttggatactatgattgtactgtatgcctccgagtaagtgccaagtcatacatttcttttaatgcagagtttcaataaaataaaaatttatttgaatgacattaatagggatctcgggcagagcttggcattttcataagtttttcaaaattcttagaacagtttggaaaaaatacatttgtgctatggtccttcctttcatctgtatccaagagaatttacatgtaaacttatgaattgaaaatggcttagaaaaacttatttaaatctctcacatttcaaagaaaacagaaaaagcttgttcttgagccagaaaaacaaacaaacaaaaacaattccccgatgcctgtccgagaggcagtacagctgcttaagtgcaaggctggatagatcagaatgacccggaaatgcttggggcaaacggttgacttggaacgttccggacaatgccagctagtcacctataaacccatacaaccaactgggaaaaataaccattaaacagatttggcctggctctaccttaactggcactttttgtttttcttgttaatagtaatgataacaataacaacaaacagaaaacagaaaacaccaaaaaaagagaaaaggtacgtggaccccaaaccacctttctactgtttctagttcatttctcacagcactatttgatgagtcattaaaaaatttatttgaaacacatttttgcaaaaatttcaatttttctcctattttgtccattttgccctgatatcctgagtgttttaggcatacttcttttttgttttttgttttttgttttgagatggagtcttgcttcgtcgcccaggctggagtgcagtggtgtgatcttggctcactgcaacctccacctcccaggttcaagtgattttcctgcctcagcctcttgagtagctgggattacaggtgcgaaccaccatgcctggctaattcttgtatttttggtagtgactgggcttcaccacattgtccaggctagtatcgaactcttgacctcaagtgatccacctgcctcggcctcccaaagtgctgggattacagatttgagccaccatgcccagccctaggcatacttcttaaatcccactttatcacactcacacgcgacccttcatgttggtttagctcaagtttcaggccataccttaaaaatgaaatgctaaggccttgattttcataacttcttggggattattataataagggaacattggatgaggcttataaagaatccaatgggtaggcttatttttatacttgaaaaatgaaaacagctttattatctttttccttaactactgatgctcattataaatgtttaaacaacataaagcaataaagaagaagaaactgcctgaaattcccatccttcagaaacaatcatagataatattcttgcctgtttcctttcagactcttgtgagtgtggatgagtatgcagggactcacagaaagcatctagaaagccaggattttaaaagagtgggaagtgggattatagccaagaagtctgcttaacatcacttaattaacactcctcttttctccccaaaattctccaaactacaaatcttacattgtatatgctcaagatggtaggggggaaagaacgttgtcagtgaattcttttaatttttttattttaaagttttatgtatttatttattttcatttatcgtgatataatatttgtacatatttatggggcatgtgatattttgatacatacatacaatgtatagtgatcaaatcaaggcattaggatatctgtcacctcaaacatcgtttctatgtgttgggaacatcttctcttctagctgttttgaaatagacaatatattgttgtgactatagtcaccctactgtgctgtcaaaccctagaacatgctctttccatttaattgtatgtcagcgaattatttatgtggaccccaggtctttagtggagtcatcagtaggactaggtgacaacaggttggggctgagcattttctgtctgtatgcaccaccggtggccctcccagggttcaaggaagtggcatttctacagaacatggctggagagaacctggtctgtaaaatcccattcttgaggggtggagcggcactgctcttcctgagtgttggtgatttcactggattatccatgctctttcaagatcatgccatttaatcttggttttagcatctctacagactttgctctatatagaaagagcttctataccccgctgaccaatcggtgacagtcagctggtgactgagcttccacatgaagggcaggggtgagtcccctgttccactgactttgaactgtgtgggctttgtagatcctgagcaaggctggattgggctgtgggtgtcttttgctgccaggctctccggagtcttattgttagctgcctatcattctactgcagaaaaattgggaagtggttggagaattgaggtggaaagcttagcttcttttagcaaaatgcagacttgacctgtgtcatcattttctgtgaacattttgaggtcgtttgctctctcttcccagtgttgactcatgaagtgacatctgctgacagatgagcctggccatcttccctcagaaccactcctttggagggtgacagctcattgcaacttgcatttccttctgaaggaaaaagcgcaaacacttcttggtgcagtttgtgtcattttccttcttatctgatatgtaaagttttttttttaaactttttatcatatatctttaaaaaatacatgtttttattttgaaccatgtgaatatctcctctcctctccccttctctgctctccttttggccttgctgtgttgtccaggctggtttcaaactcctgggctccagtgattgtcttgcttcagcctcccgagtagctgggactacaggccagcacaccaccacaccctcataggtgaagttttcagttaaattaaatacttaaggaacaaatgtgatcattgagttgtatacattgaatatgtacagcttttaagtttcaatcatatctcaataaagtggttttaaaaacagagtctcctgtagataacatatagttaggacatttaagaaaattatcctgccaatctgtgtcttttcactggggaatttaatccatttatacttaaagtgattattgttagggaatgacttaatttgttcattttgttatttgttttccatgtgtcatagatttttttgtgcctcatttctctattcctttcttcctttgtgtttagttgattacttgcagtgtcacactttgattctcttttcattttcttttatgtatattatgtagatattttctttgggggtaccatgaggatgacataaagcatcctaaactataactatctgttgtgaattcatatcaacctaacttcaaccacatacaaaatccctactgctttacatctctactccttttagcttattggtatcacaaattacatctctacacattgtgtactcattaacattgatttctaattttatgcatttgttttttaaatcatacagaaaataaaagcatggattacaaatgagaattacaataaaaaatgtgatctccgaatataaatcctcgcaaagctctgattggcttcttgtgtaaggggtatgatgtggtcatagtcaggttgaggttgaggtgtatgtgtttttttcctatctctagacatcagggatggtgctttattctatttcttcttttttcatcctggctgggtttcaggggcatataatttcttctaaagaagaaggatattctgtacattccatacacacatggctgagtggagtgttcataatagatggaagccaaatctaggtgcaaagtcaataggcaaaaggatgaaagtcagtgaaacagggtgtgtaagactcagggaatctgaagcattattttttaacataggaaacagtgctgtgtactggagacagagagcacagcccctacagccaaatggcttcatgactttttctgcattctacataggatgagacaccacatcactctagaacctagaatgtcatctgtgtgatcttcatagcttttcttctactattgttctcccacccatctatttattgaaatcttctcattcctggaaaacacctgtcagatgccaccatcttcaaaagcccttggaatctacgcagtcaaattaagccaaacgcccacgctgcacccgttcctcactttctttattttgctttactgctggttcattgttctcatgcttctccccgtactgcagtgacatctgcttctttgcagacaaaggctgtgtttctgcatctctcttctctaatgtggagagggaaggccatttagaggcaaagtgtattgcctctaagaatatttaatgtctttgaattttctcacctgtaaaaagagggaaataatatagggattttacacgttggctgtgagaattgattttaatgtgtttaaaatgtagttgtgatgatgatgttatgaaagattaccgaattgagaaaaggtaaaaaaaaagttgccaacagaaatcagatagtttccgtgagaatacagaaaaagtaaaatcagaaagtaagaatttatcagcacgtatctaatgatgtccaggcaaaagagagactctacctggtgaaaccaaagatagattataaagaatggtatgctctgttatgagatagtagcagtttataaggttgaattatctagaacttagagatgaaaaggaccttagatattacctagtcttcctcccccttcatttggtctctcaaggtcattcaaatcctatgctcttcagtaacctttcatgttcactttggtttcctgggggatactaaagctcttactcctcatcaatgaggtattctggagagaccatttttctagcccgttgaggttttataccaataagaagtaatatacaaaaattaaataaaattggaaggaaaatatttctgtaatagacagttcactttgcctctaagtggccttcctctctccacattagagaagagagatgcagaaacacagcctttgcctgcaaagaaggggatgtcactgcagtagggggagaagcatgagaacagtgaaccagcagtaaagcagaacaaagaaagtgaggaacggggtcagggtgggcggttggtttaatttgactgtgtagattcaaagggcttttgaagattgtggcatttgacaggtgttttctaggaatgagaagatttcaataaatagatgggtgggagaacaatagtagaagcaaagctatgaaaatcgcacagatgacattctaggctctggagtgatgtggtgtctcatccctgttgagtttggttctgacgtgtaatcaatcttcttatgagcttggttagaataaataattttgctaagttctcacccaaatctacaatgaattgataaactttcttctccaaaaatgcaaagcagcgggccccagaccctgggtgtggtgggcctgctagatggtagcaaccctcataggagaaacactctaaaaggccactgtgatgttcaatgtgatatgtcagcttggctaggccatggtacccagcctttggtcaaacacctgtctatatgttgctatgaagatttttttaaaacatgagattaacattttaatcagtacacttttagtacggatcacttttcataatgtgggtaagtctcatttaaagagttgagggctttaagagaaaagagattaagttcttgcaaagaagaaggaattattcttctagacagtctttttatttatttatttatttgagttggagtctctctctgtcatccaggctggagtgcagtggtgtgaccttggctcactgcaacctccacctcccgggttcaagcaattctccctgcctcagcctcctgagtacctcggattacaggcacctgccaccatgcccggctaattttattttttattttttgtatttttagtagagacagggtttcaccatgttggccaggctggtctcgtactcctgacctaaggtgatccacccacctcagcctcccaaatttctgggattacaagcatgagcctctgtgcccggcctagacctttagactcgaatttgcaatatcaactcttgcttgggtctctaccctgcagattttggacttgccagcccccacaattatgtgagccaattccttgaaatgaatttctctctctctccctcttattgattctgtttcttggaaggactctaagactgcaaccatttgcatctttaccacttttatatttttaaaactcatgtggtgctaaatctattgtttctcttctgttacttaggttttttttttttttttttggtagaaatttattatgtctaagagtagaatggcccttggaagaagaccgccccgggagattttctgagtggcaaccatcagaagctgccagactgcatctgtatttacatgttttccagccgtgtttccccagcatgctgtgggtctgtgactctccttgaaggaatttggtattcagaagtcaataaacaaattacactgaactataatgtggggctgtcacagtgactgatgggataccaactctttgaggacagcgtgcgaggggagaacaagactgaaattgcccatgcaaatgacaagggatgctgggagagttcagtgcaggatgttcctcctggtgaagctgccacagcagaaatttttgtcttggagaaccgctcactttgcattgcaatgtgttgatattgtgatgtgcagaagggtggattctgtgatttatcagttgcttaaatatcctctggtgctgtgtacccccacaaaaaagggaaggttctaagctatatggcaataacattgtagggtgaaagtggtcttcttggcaaagttaataatacttgaaatttatatatctcttcatgatttatttcagcaaacacctttgacaatattgctcgggcatgcggggaagattccggttgcttttaacagtctgaggaaagggaacctcttgagatgaagtgatttggtcaaagtcacagagctagttggtggcagaacaaggattaagactcatcccctctgattcatacaatagttgttcaggttattttaggcacagattttcataaacctcctgcacatttttttggtcaatgctatgtacttggccaatatttgttttatgccactttaccttcatttatttgtgggacaaagtagagtgtgtgttaaaaaaaatctttttttttttaaaaaaagcttcatttggggcagttttaaatatgaggtgatctattattaaatgtgtttaggagaaatgtgagttgtattattaatagattcttctatagaaataactaaagcattgcagaaccccacatgtatttttgtttttttctgtcccattctcctgatcaagtacctgactggatactgtcctagggcacagagctcccaggaaggatgtgacttgttcaagtattggcagacattttgacaaaggaatgtctcaatcatcactttattcatgaccataatcagtgtctgttacttgggttgatcttgtatttttgttcttgagtaaatcaacaagctgattgagtaaaagtgactaaatagatgatctgcttttctcccatagtttaaatgtgtggctttttcattatcaggaagtcagtgattgactttcagtacatctggaaagtctgcatggcagtaacattcatcacattttattctgtaaaccatacttccttgaaaatataacactataagagaccatggtctaaaatcatatatatacttgtttttttccccatccaaaatggatgtcttccccattagttattaaaacaaagtaacaaatgataaaaatattgaggttaggggccgggcgcggtggctcatgcctgtaatcccagcactctgggaggctgaggcaggcggatcaccaggtcaggagatccagacgatcctggctaacatggtgaaaccccatctctactaacaatataaaaaaaattagtcgggcgtggtggcaggcccctgtagtcccagctacttgggaggctgaggcaggagaatggcgtgaacccggtaggcggagcttgcagtgagccgagatcgcaccactgcactccagcctgggcgacagagtcacactccgtctcaaaaacaaaacaaaaacaaaagtattgaggttaggtttataacctgccgctaaagaatccaaattttttaaagcagaaaacaaatgaaaagtcatatgtctgcctttatttgttaattattttttagaatagagaagcaaaagttatgtatgtttatggtgtctagcatgatgttttgatacatgtgtacactatgtaatggctaaatcaagctatttaacatatgtattacctcgtataacactacaaaatctattttcctagcaattttcaagtataaaatacattgttattaactgtagtcatcatgatgtacagtatgtctccagaactgactaatcctaactgaagttttgtacccatcaaccaacatctccctattcctctcatctcccagcctctggtaatcaccattttctgctttgtttctatgagttcaacttttttagatttcatggatgagtgagatcatgtggtatttatctttctgtgcctggcttatttcacttaatgccctccaggttttatccatgttgtcacaaatgacgggattttcttctttttaaaggctaagtagtattccagtgcacacacgtgtgtgtgtgtgtgtgtaccacatttttttatccattcatctgccgacgggcacttagattcattccgtgtcttatctattgtgaatagtgctgtgataaacatgcgattgcaggtatctttttgacatactgttttcagttcctttggatatactgtatacccagtagtgggattgctggattacatagtaattctattttacattttttgaggaaatctccatgctgttttccataatggctatactaatttacattttcatcaacaatgtacaagggtttccttttctccacatccttgccaacatgtgttgtctttttgataacatccatcctaacaagtgtgaggcgattttccattgtggttttaatttgaatttccctgatgattggtgatgttgagcatttttcacacacctgttggccatttgtatgtcttctttcgagaaatgtctattcaggtcctttgcccactttttaatcaggttatttgttttcttactattcagtttctttctccctttatttcttgaccagagtagattgattatttaagcaattgaacattcacagtggtttttggtgtattatgagtttttgagcactggagtcaatgacatttatgcatatgcttttggtttttagcagttagtatcgcgagattgagattgtgacacctaaaacaaaaggaacatatttctttaaatgtgtaaattaaattttccaatgaattatggtttgttcaatacttgaatggtcagatttcatctctgagcatacattttcttttgattctattaatttactttagtatttcctacaattcagaaaccataaaaaagattactcactttaagcagaggcacagagtcaaagtcatacagcaattttaaagatacagttttaattttaacaatttatggaggcccatgagaatgtggatgtatttgaagaaaaaaggctgaattttcattttagcaaaatagtctataattaacgttcttctgagaatgcctgtatttcaagccaattatactttttttattttcactagtttccagtgagctgtttgttgtatcattctttcagttaatcagtcttttagtaattcatttattcattaagtatttttgtcaattctcctcctcccctagacaaacataccggcaattagggacaatgggcatgcacacaaatgtcatgatggattatcctgagtgagttgcagaagtgctgatatgaatctgtggctgggggatcatgcagtattatggagaagagcttacggagcaggggcatttgagcagggtgataaagggtacatagatgttgaccatttagcaaggaagaagaacacatttaagaaatagcaaaagcaaatggatttgtttggaaatctcagtgtggtgggaagaatctgtgaacagccatgtgaatttattttctcttcttttaagcacccctctcctatttaaatacttggctacagcactgcatgaatcagcatttctcaggatatgttctgaagtgtaccagttgtgtaagatgttcctggaaaaagaggaccaaatctgagaaatcttgcagttaggagcttttttttttttttttttttttttttttttattcttactctgtcacccagtcacccaggctggagtgcggtggcaccatctcagctcacttcaacctccgcctcccgggttcaagcgattctcctgcctcagcctcctgagctgctgggattacaggcgcccaccaccacgcccagctaatttttgtattttcggtagagatggggtttcaccatgttggccaggctggtctcgaactcctgacctcaggtgatccgcccgccttggcctccaaaattgttgggattacaggcgtgagccatcgtgccctgcctatggtggctttttaacattctgtggaatctgtgttccatggagcattgtttagggaatgttcctctgaaataatatccaacatcagctttctgtagaagaaatatcctaccctgtttttagacgaatctgtagaaaggagcttcaggtggccatatgcacactgtggatctatttagagttgtagactaggatctctccactcattttataattctctcttctcatcctgaattggcaactttttaaattttataatagataataaaaacaaatacataaacttacatatggttacatagtctgatgcatctatgttgaataaatataacatgattattatttgatacatcctaattatttgttgaaaaaatgaatatttgagagacctcaattgtttggcgtggcagatctgttgctggggagtgacagttacaacgtgtgcaactctctcactaggaaaggtgatgatattaaaatattcccatctgcagttctttttcagtacaaaggaaatctagtttataaataagttaaaaagagaattcctttaatcatgtatgtgtgtctgtatgcacaaaattgagtcacatgcatgctatttagttaaagagaaaattaaaatttgaagaatgatatcttaaagttgtcccttttaaatgagaaagtttagcattcaaggaaaagagctaattatcctgtttattgtgcatagaaagcacactcgaagatcttggatttttgtaagattgcaggctttcaaaattctgacagggctgcttctaaattcgtcaatgttgacggctgtttttttgtaggatgacaactggttggtgttgctccattttattgaaaaaaagaaaagtatcaaaaatggctccaccatctgttggatgtgaagcattgtactatgagatagtgtgtaatgaggaaaggctgttgctgggatatcgtctgagaccctttttaagatacaaaatgtgctatatgagggaaaaaggcctacttctgtcagatttaagtctctagaagagctgtataagtaggttacagggagatattggtggaagcattgtcctttcttgtttgcatacacagcagacttttccaccttctctccttgatttcttgggcaatgttatttttgaagaagaaaagaaaagtcttcctcagaggacttaattaaatggttcaatggagttagctacttttacttttcatgtggtttaattctttaagtgaaagcaaaggctctctgtgaaagccatttgtttttgttaatcaaaatgaatgtgtacttcttatcatgtgaaagagaaaattgttgcattaagagcttgtggtctgcaggaagaatccagaggtttgctggtcaatggttaaaaaccagctctctcagagaacaaaaaggcctgatttgcagtgtttgcgattttctgtggtgaaaaatactcccaccatggtaaatttcaagccatcaagctggcattacatgatctgaagttggaaagaacagtgcaaaggcacatcctgatggcattttcccttacagatacaagagatgtgactaagagcagagaccataataccacgtagtaacataattaggaagtgaagagatttgaacatttattacctttgcttatattaccattgatttaactgtaagttgatacaatttaatttttaataatggctgtatttagcaacttactcataaaattctcaaaaagtgcacagtcagctcccatgagccagtgtgagccaactctagcccactgctggtagacaagcctgtgttagatttttggatccaacactcactagctgtgtactctccaagacgtacgttcctcagtcccaaagtgaggaaaatgagagtatgtacctcataaggttgttgggaggattaaatgagacgttaaatacagagtccttggaggagtacctagcaccgtactaagtgctcagtaaatgtaagtaatttttagcattagagctttggaagttgggcattcttagtcacaggatgagataggaggtcggcacaagatacagtcacaaagaccctgctgataaaacaggacgtggtaaagaagccggacaaaacccaccaaaaccaagatggcaatcaaagtgacctctggtcatcctcgctgctcattgtatgccaattataatgcattagaatgctaaaagacactcccaccagcaccatgacagtttacaaatgtatgacaacatcgggaaattactatatatggtctaaagtggggaggaaccctcagttctggaaattgcccacgccttccctggaaaactcataaatactccacctcttgtttagcatataatcaagaaataactataagtatactcagtcgagcagcccatgccgctgctctgcctatggagtagctatttttttatttttattttcttaataaacttgctttcaataataataaaaaaaagagtagagggaatgccatatagctgtatatctaactatccttctagtgattttaaatctcaaaggcatttaagaatgggctgaaggttagtataaccttctttctgttattgcttgtttttagtaaaagcaatttctctctcaggtcaaaactctcctttttcttctcggcttttttccatgttgtctgcatcttcccttggttgttagtggtgatgatgatgttgtctttgctccatcttgacagtgctgtggcagtattgaagctgcagtggctttgcaagcttttgatgggacatctgtagctctagaatgaagctggaacagaaaaccaaataccgcatgttctccttcataagtgggagctaaccattgaatacacatggacacaaggaagggaacaatagacattagggcctacttgagggtggagcgtgggaggagagtgaggactgaaaaactatcaggtattatgctgattacctggttaacaaaattatctgtacaccaaacccccatgacatacagtctacccatgtaacaaatctgcacatggagcccttgaacctaaaataaaagttggaaagtgtgttagttctttacattgctataaggaactacctgagactgggtaattaataaagaaaatgggcttaattggctcttggttccacatgctgtacaggaagcatggctggggaggcttcgggaaacttaggtggaaagtgaagaggaggcagggacatgttacatagctggaggaagaggaagagggctaaggggaaggtgctacacacttttaaacaaccagatctcatgagaactcactcactctcacaagaaaagcaagggagaaatccccccatgatccaatcagctctaatgaggccccttctccaacattggggattacaatttgacatgagatttgggtggggacacaaatccaaaccataaagaaaaaaaaaagaaatgtgattcctaaggttggtagtggggtttggtgggaggtgtttgggtcatgggggccaatctctcatgaatggctttgtgtcctccccatggtaatgagtgagttctcgctctgttagttcacatgagagctggctgtttaaaggagtctggcatctccttctctcctctatttctccttcgctcaccaggtaacatacctgctcccccttcaccttctgccatgactggaagcttactgaggcctcaccagaaacagatgctggtgccatgcaccctgtgcagtttgcagaactgtcagccaaataaaccctctttctttcttttttttttgaatggagtcttactctgtcaccaggctggagcaacctccacctcctgggttcgagcgattctcctgcctcagcctcccaagtagctgggattacaggcacccgccaccatacccagctaatttttgtatttttagtagagacggggtttcatcatgttggccaggatggtctcaatctcctgacctcgtgatccacctgcctcagcctcccaaagtgctgggattgcaggtgtgggccaccacgcccagttaaaccctctttctttagagattacccaggctcaggtattcttatatcaacacaaacagactaacagttggtatttcaaaaatattctctggctgtgtaatcctatgctattaaacctctgccagtcaaaaggatcatcccacatgtcacggtctactgcatcctcccattcttcatggttaattgttttcctgcttgcttctgtgaggtctgtatttttcaaactatggattggctccatttactgggtcagggcattgatttgatgggtcaagacaaacattaagaaaaaaggaatatattagaataaaatagaaaaagttaaagggcatcacacaaaattagtctaggtattattccgaagcttgcattttatatgcatctgggcatgtactgagctgtgaggtgagatgcatctcttactgtgggctccaatcaaagttttaaaaacaccattttaagttatgttcagtggttactgaatcttttacataatttagttctctcttgaatcttcttgtcgtcatagaaaatgtcctatatcaatttttacagctataaccatctgatcttcaacaaacctgacaaaaacaaaggggaaaggattccttgtttaataaatggtgctgggaaaactggctagccatatgcagaaacagaaactggacccgtccttacaccttatacaaatattaactcaagatggattaaagacttaaacgtaaaacccaaaaccataaaaaccctagaagaaaacctaggcaataccattcaggacatagggataggcaaagacttcatgactaaaacaccaaaagcaatggcaacaaaagccaaaattgacaaatgagatctaatcaaactgaagagcttctgcacagcaaaagaaactatcatcagagtgaacaggcaacctacagaatgggagaaaatttatgcaagtaacccattggacaaaggtctaatatccagaatctacaagggacttaaacaaatttacaaaaaaaaaaaaaaaaaaaaaaaaaacagccccatcaaaaagtggacgaaggctatgaacagaacacttcttaaaagaagacatttgtgcagccaacaaacatatgaaggaaagctcatcttcgctggtcattagagaaatgcaaatcaaaaccacaatgagataccatctcacgccagtttgaatggtgatcattaaaaagtctggaaacaacagatgctggtgaggatgcggagaaataggaatgcttttacactgttggtgggagtgtaaattagttcaaccattgtagaaggcagtgtggtgatttctcaaggatctagagccagaaatcccatttgacccagcaatcccattactgcgtatatactcaaaggattataaatcattctactataaagactcatgcacacatatgtttattgcagcactatttacaatagcaaagacttggaaccaacccaaatgcccatcaatgatagactggataaagaaaatgtggcacatatgcaccatggaatattatgcagccataaaaaagaatgagttcatgtcttttgcagggacatggatgaagctgtaagccatcagtcttagcaaactaacacaggacaagaaaaccaaacactgcatgttctcactcataagtgggagttgaacaatgagaacacatggacacagggaggagaatatcacacaccgaggcctgccaggggctggcagtaaaggggagagacagtattaggagaaatacctaatgcatgcagggcttaaaacctagataacgggttgataggtgcagcaaacaaccatggcacatatatacctatgtaacaaacctgcatgttctgcacatctatcccagaacttaaaataaaaaaaatatatggagggagtgcatgggttataaccttgagttgctacttgattgaaaatgtcatgcttttcccctcatagttaggtagtaattttgccctcaaaaccttaaaggcatagttttgctgataagaagatgtgatatcataactttagaggcaaacttttctctctctctctctagaaggtttctgaagaatctacttttgattctgaaatctccctagggtatgtcttatgaagacatttttgctcgttctgctgggcatttagtttgttcttcagaggtgaagatgcaaatggttcttactccctttcttgtttctgaacctcgtattaaatgaatttgtctacagtttccttaacttttctctcattttgtctatctttctactcttcattaggggagtgttttttgacctccaatttatcttgaatgttcattccattattctatctctctgttgactattttatttcaacaatcacacattttttaaaaaatcactttttaaattttatgtagagtaaaatttatttttggaatatgattctatgagttttgacaaacccatatagttgagtaaccactgccacaatcaaggtatggaacatttcatcactccctaaaattctctcttgtggcccctttgtggtgaacctgccctgactgtcacccgacccacatgaaccactaatttcaacacatatatttttatttttaaattttttaatggctccttggtatttctgattcccattttttttctttgcaatttgttcttactttattgatctaacttgattttgttgtgatattcaaaatcatgtaatgtcatatcctcttgaatggttttcagggttctcatgcatgaattatctgctccttccagggctagccttattctcttgtgctcgctctctccctctccccaccccctccacccccaccctcattttcatctttgttcttttctttcttgctggttgggttttcttaaatgactggatggtcgctggctgcttgttcatttttaggagcaaagaggaggctgaatagcacaggtggccagaatgggtttcagttgcaatggggaagtcctgattcctgagtaggttttagacttgactgggaatgctgactgtgggcttctacaagtgctgtgcgtggccaggggtgtcaacagaccagcttctgtaaagtgcacaggtgggaacagctacggtggagaacctctggagtttctggaataaacaaaacgaaacaaacaaaagcaaggagggctgtattccaggggtcaagagctttagaatattctacgcttgagtagtgttgctccccctacctggtgtctgatgtggagatacccaagtcacctccaggcctaatattcctcatctctggcctcaagacagggtatgtccatgctcaggcggatggttcactttctgtagagacaagcttaaatctgtacctggggtagatgcctcttctgctggaggaacgtgctttgcttatatggagtaaaaggagggtgcaaaggacctgagtagccagctgatctgaatgcactttttgaatagcctggccattgtgggcctggtgacatttccagagcccctatctgtctgatatcattggctgttttgtttttctatcaatctgctcctattcattgactatcaactaaggggtcttccttctttcctttctactgtcaatgcttttattctttattttttaaagttttaaatttgagacagatccttgccgtgttgcccagactggagtgcagaggtgcaattatggctcactgcaggctcgacctcccaggatcaaatgaccctcccacctaagcctcccgagtagctgggaccagaggtgtacaccagcacgcctggctaatttgagaattttttgtagaaaggaggtcttgctatgttgcccacgttggtctctgggatcaagcaatcctcctgcctcggcctcccaaaatgctgtgattttaggcatgagccactgtgcctgtccttttctttcttttttcttttgagactccagctgtgtcccccaggctggagtgcagtgatgtgatcttggctcactgcaccttctgccccctgggttcaagtgattctcctgcctcggctccctgagtagctgggattacaggtgcgcgccaccatgcccagctgatttttgtatttttggtggaaatgggatttcaccatgttggccaggcttgtctcgagcttttgacctcaagtgatccgctcacctcagcctcccaaagtgctgggattacaggcctaagctaccgtgcccagcccttttattcttttaaacaactctctttcttcctgtctctgtatgtatgtacatgttatatatgtatatatgtacatttaaaaatatttcagctgggctttgggtgggaggtttgccatttgagaagaaaatgtgtatgattttgaaggtaataaggatatttattttaaaatatggtgtctagttcagaccttccacaaagttcttcttttcttcctatgccattatcctgtgatggaaaaggcttaaagctggacatctttctcctgattcaaggcactgaacacagcagaagtataatgacctattgagttttagtttaattatataatcgatggccaggaataagtatatttaaagaagagctgatatattttgtgattagattctgccttgaagtacctaggaagaaagtgtgatttgcttattgagttgcttggaagaggtgaggagaatagtcggggtcacagtagttgacaaggttgtacacaatgcttagttcattttctttaacacatactgttgtaaaatatactaattttggggggcggggggaaggagagcatcagaataaatagcttgggggctgggcatggtggcttatgcctgtaatcccagcactttgggaggccgaagcgggcagatcacttgaggccaggagtttgaaaacagcctggccaacatggtgaaactctgtctcagctaaaaatacaaaaattagccaggcgtggtggcaggcgcctgcaatccagctactcaggagactgagacatgataatcacttgggcctggcaggtggaggttacagcgagttgagattgcaccactgcactccagcctgggcaacagagctagactccagcctgggcaatggagtgagactctgtctcaaaaataaataaataaataaataaataaataaataaataaataaataagaataaatagctagtgcatgctgggcttaacacctaggtgatgggttgacaggtgcagcaaatcaccatggcagatgtttacctgtgtaacaaacctgcacatcctgcacatgtaccctggaacttaaaataaaaatttaaaaaagatgctaattttggtataatttttccctccctcagtgcatcgatcctgaaaaaccatatttaaatgaatttaatgtataaaatttggaacttaataaattgaagtgcgttagacagtttcctccgttagacagtttcctcctctccccaaggacagttctttaactccatagtggaggccaatgattacatagatattagtctgttgaaattgcttttgtagtcatacaagttaggaaataactgatctgcaaattgtcaaataagtagagtctatgtattgcaaggaggcttatcctgtgctctaggatgtctggcaacaggtgcctgcgttactgtgctgagaagaatgttggatcttttctggactctgctgagagtggtgtgattagtaatgtctgctctgagcacaggaggtagcccataagctaggcatagatcagtatgccggtggtagtggttgttcttgttatttttattgttaattattagttttccacaatttatttagcttatttattattttgggccatacatttatagaccatagtattttaatggaaaatatatacctgaatgtaatatggtatttctagttttgtttgggtctttttttttttttttttttttttcgagatagggtcttgctctgttgcctaggttggagtgcagtggtacaatcacagcttactgcagcctcaacctcccaggctcaagcaatccttccacctcagcccccctagtagctgagactacaggtgtgtgccatcactctcagctaatttttgtatttttttgtagagatgagttttcgctattttgcccaggttggtctcaaagtctctgacttaagcaatccacccgcctcggcctcccaaaatgctgggagtaccagcgtgagccactgtgcccagactggtgttttttaaagaaataatttatttgaagatgtagttttatattgagagccaaacgagagccatatcataagagccaagtgagatattgatattttatcatacaattttcttttcttttctttctttttttttttttttcggagacaaagtctcgctcttgttgccaggctggagtgcagtggtgcaatcttgactcactgcaacctctgcctcccaggttcaagtgattctcctgcctcagcctcccgagtagctgggactacaggtgcacaccgccatgcctggctaatttttgtatgtttagtagagatgggacaattttcaataagagatttctgttctacatggatgaattttgagagtgacagagatttaagttttaatatttgtgatatattcttataagtgggaactaaacatttacacatttatgtacatctacacatggtcttttcttaaaaatagaattattttatggttttcccccatctttaggctttaaataattatttttgttcatattgcacatttgctataggtatgatacttatttattatctttatcaaaggaatcgaatgtgatccttcttgtgcttctaatgttctgttttcttataaactttgttttgatatttttcagagtatactcatatcttagatactcgagtcccaaatctgcgtgtgtttctcttggctgtaatcaacagtgccggttggtgttcctgggcacaaatcacagggctgctcgatgtcacacatttccttgtttgtgtattcccgtgatcaatatcagcaacagcacagggaatagactctcttccactagctcatatttttcttaaacaatatgtaggtgtgtgtgtgtgtgtattaatttctcaccttttacaccataattcaaaatctaggtgacatgtttcaatagccgataagcatttcatagtagggtaggtcaggtttaccgtataatccctttgataatgccttcttttataaatacatgagagaagttacaattgagtcctgctgaggaagtagatcaataggtggcaagctgtttgacccttcgagccagaaagagaatttggtaaattgttagacaggttattgactgccctttagagagccaggggtttggattctgtaactcctttcagctggggcttgtatttcacgtgtgagaggcctacattatcataatccattttttgcttttatgttatctatcagcagctctcataagtctgctttctgaagggcattccccatttacgtgctctaattcaccgtcttttaaaaaaattataaaattgatggtttgcaaccagaggcattatatgtgagttgtttatagaggtgctgctacagggaagaaggttagtggtagaattaagaacaagacgatggctgtggaaggaaattcatgaatagacatcgcatcaacactacaggaagataggctcaaaaagcatcttagaccccaaaatcccagaagaatatcaggcttatagtcattataattatgcctttggctgatgttgaatggtgctaatggtacactaccaaatttttacttaagtggctccattaagtggaaaatgcccagattgaccccaatatgtaaaaaaggtattatcttaaaatgtctctacctattaaatggtgattctcctggctctgctcaaatgggaaatctgtggaaatatgtagaattgttgcactaatgttatcatgagacttaaaacatttgatgggagaatttcttcatttgtacaattttacacatctgaaattataacccaatttggattatttttgtaaattattaatagcttcttataccatttcctaggacattttattcatttgagtttttgagttttgagttttgagttttttattcaagggaaaaatgttctgtttttcttgttatctcatataataggctgttttgctttacagttctgaaactaacagacagaatcttttatgtgcaatgaatgtgagttttaaaatttttttatagggaataaaacatgaagactagtaaagtgagtatgtgtatactctgtcctggaagaagtgagtgaaggaggcccaggacttgacttttgggggttcaggtcttctacaacttgggctcccggtgggaaagaaagaaaatggtagaaggagaaactgcccaggcagcagagtcatctgcaaaagcaagtggctgactctgttctgttcttgatgtggcagcttggagctggcttcagttcagattttctaggcattggaggaggtcttccttaaacaaatctgttaacatttttgttttggggagaacacagcgccgcttagatgtaaattcaccagttcatgtttctgcctgaagttgctgcatctcactgctcccctgggcctcccatcgcggcaggaataggcgtggtcttggtccatccaatcttcattgctatgcctggtttttgtcctgcggtcctctggctgtgtttgttcctgttgttccctctgctaggggaaacctctttgtttgagcatgggattccttgggcttctgcagctctgggctttctcttcctggggtagttgtggtggcagctttctcatggtgagcaggtgatgggtgacccccatagggttcatcatcatcctctttctctctctctcctcctatctctctgcctccaccctagtgacatgctgtttccttttctcactacttctgggcttaaatgcagacatcctcaatgaagctaactcagatgggacagacatccacgaagacagccattgtcaaacagagagaattgttcattctttctactactctgttctcattccatatggcacacgtgggcatcacgctttttcctccacatgggagctgttggaggcagggtgatggtcatcagtgcacaccggtgtgtcctaatggtaatttgtagccaggcctgctctgatctttcagataccatttttgattggtgagtgccatgatgtacaggtgttaagtcgtttgaataccacccctgcatggagacatgactaatatcattgtcacaaattccgtatttcacatattggctcaggtgcagatctggagtcatgctcctttttgccatctttcctatctgactccttccagtggtctttgttccctctgtctcctggaccatggctagagttcccagtgtggtcttttgggacattcaccacacctactttattttcatctttccttgctggtcctttctcagacggttgagctggagttacttttcccccaccacttgtagggtattcgtgctgtgtgtctgagctctgagatggagcaggagggttagaacctcacttcaccaagcattctcctttggtggaggggctggcattaccttttggggctgatcagttttggtagatttagaagttggagagtgacagtcttcctccttactgagtgtttcattttctagagacttttcagtctctctccttcctgcatcctggtctgattgacttttgccgggtgtggcggaggtcccagtgtgcgatgactcacttcctgtcctccaccgttccagttcctgagtttcttcacttcgccagcttgggtgcctctccggttcctgggtttcttcacttcgccagcttgggtgtctctcccgaggccgtcattctagttttgcctcatccagctgatgctgcaacttatcttgttccttctgtagccattcttctacttttgtttctctagcagctctatcaacgggctttgcccctccaaagacaaaataagctcgaccggactgggaggtactagcagaagaatcatctcccttaggagtattatgaggctttagattcagtttgggtctttgagggggacgggggacgtctatcattatacctataatcatcccgagagaaatcatctctggagctgcacgacccatcatcccatctgttgtatcggtcttcatagcggtccctgcctcctctgtagtcattgtccctgggtacccactgccaaatgcccttctgccactgcctatccaggaatgatagcctctagcatagtctctgctgcctcggtcatcatagcgatccctaccgccagccatatcgatccatatcccggcatgggccatcccgatactcataccaatacccacggccagactggtctgaatcataacgatctcgatacttgtctccaaacctatcatcaccccttctaggcgggtagtcatcaaagctgtctgtggcagaacgagccctccagtctgtatctgttttgtcagaatcccgatttctatcacggccaaaagaacgatcgtccctgtctgtatcctgtgcttgatcagcaacgtccactcgaattctcctgttacctagagactcttaattgagactcagggcactgagcagggaatccaggtcctcaaattcagcataaccaaaacctttcaacctctctggattgctgggttcacgtggtaaacgcactgcactgataattaatcctctaaagaattccttaattgactcttctgtcacatcataggataggttccctagaaaagaagtgtagggtggcgatttgggaagaaagctccagttgatattgggttcccgagcagccggtggagcagtgggaaggatggaatggtcaattggaggcgccctatacacattgttatcattactgtgtcaaatcgttgaaacatctccttccaggtcatctgttgcatcagcccagctgactggtttggaaacataggtgcttcctccaccagtcccccagtcctcagctagaaagtctgttagggagatagttttcctcttcttattcgtcttttttgctgaggccgccatgttgggagcgggaaagcaacactttcattttaaaaagcattttgtctcatattagtatagctattttttagtggaatttaaaaatatgacaatatcaatcttttagctggcaagtattgcctatttacatttttatgattattgaattgtttctcccaactgttaaatttctatttgtcctgtttattctatgctttttctctctgtcttcatttttttttttaaattatattgagttagatttttggttcttctaaaaaatttgatattttcccttttttaggatttgaatttatgtaatcttatttccattttttgtgattatacttaaaatgttattgcatgtgcttaaacaaaatctaaaattcaataatattctaacctttctcatgaaggatagaaagatcttagaatactttaattctcatatgccctctcaacttattgtccagtattttagctttgtctttaaaaaaatcctatatagtagacactgttattattccacacaatgtgtgtttgtgtgtgtgcctgtgcatgcgtgtgtgcacatttacattttatttgcttgccactctccttttttgcattttagcttttccttctggaattattttctttcttcctgacagtgtattctttataataagtagcttcatagaagacctgatggtggtactctctctcagagtctgcttatttttaaatgttttatttctcattcttcttcttcttcttcttctttttttttttttttttttttgagatgtttgagatggagtctcgctctgttggccaggctggagtgcagtggcacaatctcagcttactgctacctctgcctcctgggttcaagcaattctcctgcctcaacctcctgagtagctaggattataggtgtgtgctatcatgcctggctaatttttgtatttttagtagagacagggtttcaccacattggccaggctgctcttgaactcctgacctcaggtgatgtgatccacctgccttggcctcccaaagtgctgggattacaggtgtgagccactgcacttggcctatttctcattctttaaagataattttgaatgacataaaacaaccatttttcctacaaaatggagtggttcagacttaggaggaataattaaaattacatttaaaccttctatcatcttcctacatccctaacagttagttatggtcttggtcattgggtaaaatgacttccttggttaaaatcagagtgtgaaagatggtccccagcaaagagattggtctctctcctaactcagagaggaggagctaaaaagccagtttcatgatgtgaagtcacaacttttgctttttaaatgttctttaaaaatatggccaggtgtggtggcttatgcctgtaatcctagcactttggaaggctgaattgattggaccacttgagcccaggagttcgagatccagcctgggcaacatggtgaaaccccatctcaacaaaaaaatacaaaaattagcctgacatggtggcagttgcctctggtcccagctactcaggaggctgagatgggaggatcacctgagtccaggaggtcgaggctgcggtgatgtgtgatcctgccactgcacttcagcctaggtgacagagtgagactctatctgaaaattaaaaaaaaaaaaacaaaaaaagttgttgttttttttttaaagataatacgttaaatatttagtatacttcttcctttatgaatgaaagcctgttacgcacaaaggggcctgtgctggggtccccaagaacatcctcagttttgatgattctctgggaggtttcacaagaatcagcatacagtcctgcttattcatgtggccatgatttgttatggtgaaaagacacagagcaaaatcagcaaaggtaaaatgcatggggacatgtcaggaggaagcaagacgcttgttccagcagagccacacaagatgcgcttaactcctccagcaatgaattgtgacaacctatgtcaaacactgccaaccagtgaagctccttagagacttagtgcccatgggtggccaagagggggagtgggttatcaccaaattccagacacccataaagaaagcaggtgtttagctgtttgtacaaacagcttcagcacagtgaaccactcttggtggttaatgatggtagaaaaccctccccaaattcaagttcccagacaccagagaagggccatccttctaagcaggcctttcaaatgaatgctagcaggcagccctgccatgttaactcattttcacataaagcccataaggaaatcatcatatagcaacaaattcttttgacatctgaattctgctctcagatcctctagtttgagtgtaaatgtgacagtggttaggtaaacggaaagccagagaaggtggacttaagtgctcaggagggagaagatggagatggatataatcgatttagaatatggcaaaagattaaggggccatggtggctgtttgatttcaccaggagacaggaatgaaaacaaagtttagagatttgttagagctagaagtcttaaaattagtggttgcctataatgttagagatttatatctattaaacaagacttattaacctcagcactgttgacatttgggacaggataagtctgtcagggaggggctgtacagtgtactgtaggatagcctcatttctggcctcctgaccacgagatgtcagtagtattttcccctccctactcactcccaaatgagacaaccagaaatgtctccggacgttgcctattgccaaatgtcctctgaggacagtatgaaaacatgggttttacagaaaataaatccatgaagatcttagctttatatgtctgagttgttcactaatgtttctcatttacagtagttttccatttataaaactttttcatgtgattccagcagcaacttcatgagagaaccaggaatattttattccgactatatagatgaaggtcgtgagacacagaggttaaattactttgcaggagagcaaagagaaagtagtagtagttagtagccataatattaatagtaatagtgataataatattataagtaatggtagacattttcttgagtgcctactatgagccacaaatggtttcaaatgacttgcatgtgtgaattttgcagcaagcctgaattgtgctactcttatgtttttcttatagatgagaaagttgaggccagagaggttaagaaacctaacccaaaggcacacagatggaaggtagacaagccaagtacaaacccaggcactttgactcctgtgctcctataagcaccggaatctggataaaaagagagtgtttctgggttctcgctctccccagtcatgttctttctcattcccatctccatggaggttgccatttgcttatgtcgcttcctgcattttgacgagctctgacgaggtctagtgatttgcatataacttttcctatatttttaacaactgaatctcacagagaaaaaaaatttgaagtcatctttctgtgacctaactttactatttcagatgcagtcttctattattatcttgattctctctgtctttatttttaatacagcattttatggaaatctggatttgttgcaactgtcagctcagtcttgatacacacacttcagccaattcttgcatagctcatctaagagacttctgtttatgatgctaaacatttcagcatattccccacatctctcaaccagctctgaatgcgttacatgtcatatttccacaattatgttttgttttccatgaaacttatgaatgtgtcaattcatccattcctccttttttttttgtttcctgattctctttgaacatccatttctcatgccctgtgtcttcttcctacattcttactccaatatggaggaggaaaaaagtgttattcttcctctaggcctggtggagaaatcttctgttttccttaagatttctattcaagacaattttttaggaagacctttcacaatcttttgaatgcagtgtttggaaagggctttagaattaattgtatggtgctaccgattcgtgttagatgcttgacttctctcttctataatcgtatgaggaccaccagcccctcagtttatttcttatcttatctggttttcttttctttttctttttttgctggagaggtggagtggtgggtgagtggaagttgagattgtgacttcagagcagaatgttgtcggattagattagatggacattactacatggacatgatgttgagaaatccagtgtttgatgggattttcagatgtgttgagtttgaaattaattaggttcctacagatattgtaattttcattttcagtataaggcagtatgagttgccatctctataattacacttatttcttctgagtcttatggtctcaactcatgaggccatcccactctttctcaatagttaagccttctttttttttttttggaagatcttattctcttgcattttgctagctctgaatataatgtgaatcccccaatcctcaggttttaattcattttagttctcatgatccctggtagtttcaggtataaattccttctttccctcagcatttattattttcgttactaatactaaattgaactttttctctcctacatcaagattttggatagtttcttcctgttatgcatctttagagaaagttatgctacatactgattaacccactattaaaaaatcattaaatcttaggatttaaaaagataattggaaaaagtacaaagcattgttatatgtttctagtcctagatatcagtatacattgcatagtatgctagtaagtttgcactttggtcatgagattagcagaatatttttctaaaagacagtagaagcttttcaatgttttttttttttttccccagagtaacactttttccaaatagaactttgatgctcataccaaacttatcaaagtagtgttttatttatatgcatatattttataagttctatcaccctttcatgttgcaaagtcaaatggtgagaacaattcaattattttcctgaaatgatacttcaaacttagtggtatgggcagcaagtgaagttcattactatccaaatagaattcatttttgtcttgcatggaggaaatttgtgcacacatagtgaagagacacaaattgcactctcctctaacagttcacttttcaatctcaggatactctttaattaaataattaagcagaattttactttattttatttatttatttatttatttatttttgagatggagtctcactctgtctcccaggctggagtgcagtggcacaatctcggctcactgcaacctccgcctcctgggttccagcgattctcctgcctcagcctcccaagtagctgggattacaggtgtgcgccaccatgcctggctatttttttgtatttttagtagagactgggtttcaccatgttggccaggctggtctcgaactcctgacctcaagtgatccacctgcctcgtcctcccaaagtgctggcattacaggggtaagccactgtgcctggcccagaattttaaattaaaggtaaatggcagaagaaggttgttccccaaagcatgcccccaaactgagtgaacctgcaagttagtatgaaggggatctctcaacgggctaaactttctgtaacacatttgacagtggattctaattacagtttaaaaaatggttaaaatccatatgtaaaattttcaaattaatcattgtagagacctgaaaatctcagtggcaactttatcccacagaatacattttgaaaaacaaaacacaagaaaacatgctcagttgttactatagctttaaaatacagccatacgtagttgctacattttaaagttcagtaaagttcaacttcccaagttggaacttgcaaatattacataacacaccagagttgtctgcctaacttcctctgtctattgtctggaacatagttcagaagtagcccctggaagagtgtggccaacattttgtctgacttcagcataaggagagcaaaagaccttacctgctacaccttactcgtttgaatcaataactctggtatttaccaacattttaaacaacttgactatctagagaagatgaggcagaaccgaatgctgtgtgtgagaaattatctcttgacagtccagcggttatacaagcataatcatcttgtatgatttgggttatttacctttacaaacttcaaaagcatgacttctttgtatcatggtctgataatatctattaagatgaccctacattatcaggaaaaaatataactagattcgtttatactctaagaaggcaggaaaattgtgtaaagggttttgaaggatgttaattaaaatagttaaaatgagtccagcagttatggggttaactccaattacctggaacattggcttatatgggacattaaattcctgaagaatgctggaaaaatgagaattgcatgtacattttcctaccacgaatctgactccgtgggagctacaatatttaatctttatttcgcaagtgctagcgtgctttgggtaggctttatctgcaccgacaaatgattactgcatcagccttctcatgggacgccagggacagggatgctgaaaagaaacttttaccaggagagtcgagtttgaaacagtgaggatgttagagaagccacaggaagagacacacgtggataccagaaaggagaggggctagaaagaagcaaacagggaggatgttctttgaggagcagctctgagctctgtggcttttgtgaccatggggtcacagcagctaaaggtgtctcctcagcgccagccgaacatgggagcagtgagtagatgggacagcagctctgaatcagtgtttgagtctttacctgcacacagggaggaaatgccatctcctcaccaccaggggagtcatctgtgaacataagaggccgctgaatgtttgcacaaatgcgacgacatgccttataggacacgctgaagtttgactgtagccaaggcatgggctccttgtgtggttgttctgctccctccatcccttcgtttcttctgtccacaagtatttactgaggtcacactaagaggcagacactagcaggtgctagcgatataggcaggaatgcaccccagcaaggcacaagacagcccactattgctaccacagaactttcgttgtactgtgaggcagaggcctgccaataggaaaagccatgagcaagataagcattagcacaggggcagaaaagtccatccaggggccattcctgacccaaacttgggaggccaggagagcttcctggagaaagtgacatctaaggcaagacctgaaaaataaacacagtttataaaaaatgggcagtaggatgggaagagggatgggttttccaggaaaggggaataacgtgtcaggggagcagtgggaacgagaagggggaactcaggggactgaagtgatccctgcagcaagagcatgcagttttcacagtgagaagtctgcagaggcctggccatgggggccttggcagacaggaggccagactttattccaagatcaactggaagccgttgaaaggttttactcaggggagtgacgtgatcagatttgcatttgagaacatttgttctcagatgggaagggcaagactggctagtgctgtagtcacctaaacgataaatgtggccgacaattaaaaaatggagtcaagatggagacatatacacatatatacatttatataagtaaatagttgagatatatttgcagacaagatcaatagatttggtgaacgagtgattggatgtgtgaggaatctagattactcccagctttctgacttgggctacggggcactaatataataaatgaaaaagaagatccaggggaggaacttgtgttatggaggggtggggtgatgaacagctgtgttttggactggtggagttgtgctgggtatggaatctgcaaatggaaatgctattggatctgaaactcagacttcggagtagtcagctcacagagaggccccaaagctgtgggaatgatgtgatccccaggtgatggtgtagactgagaagagaagagatcccaggtgaggaccttgagtggggagatacacagacttaggggagcctgcaggagacagggaaggaaccactagagggagcagctgagccaggggtgtgtgtaaacccggggagacgacatttcaagatggagggaggccgcccaagaggaggactacaagatgtctgttggttgtgtccacagaaagtcattataacgggcaagagaaacttctagaaacggaagccagaagccagtcatagagttggggaatgagtcggagaggagatgggcaggcactgtgaggtgaggcttctttgtcaggaagtttggttggaggatggatgatttggcacacatgctggaagggtgtgtggggtgcaggaacggtggaggttaggagaaccttgagcatgggtgaagatgcgcttagaaaagagaagtcaaggttaagctgtgggagagagtgaggatgtctgggcgacagagccatgagaatgggatgaggtctggaataatgacagagagatgaccttagccaagctcaggtccctcttccactgtgatggggttgggaaaaggggggatgtgcaaaacaatgggtgtgaaagtgttgttttgtagcacaatattttaattatgtccttttaaaaaatttccccacagacactacccgaagcagtccttcaccacggtggcagatacacctgaaaatcttcgcctgaagcagcaaagtgaattgcagagtcaggtaacttctagaagatttgttttgttcccttggccctaaagatttttcacaaggctgctcttctgagattcttgtcttcgtactgttcctgctgggtcaccagccggtgtggaggctgaaagcaggcctgtgtgggaattccgggtgaaagtgttgaacatctgtactgttcccggtcttgaattgtcctgatattctcagttttgttattcacgttggactagggcaagtaaatgagttccggtcagagtcaatgtttcccaacaatcttgacttatttggtcctaaatatttaaacacattttacaaatagcttttccacaccgcatatgtggggaaaaacaaggtgttaacttgacccagttgcagtgtgtgtgcggctaacaccccgtctgtgtatctcacaccagccaagggctttgttttcctcctgtcactttgttcatatttctttcatatgtcacattgacagcatgaacaaagatgagaacaccacaattggctcccggtcaaccatgttagatggcaacttgccttcaatatggtgaaacacatcagttaagactagggttgtgagtggcagcgttttctgcagggacacttgatcttttagtaaatatggggtgctctctttcaaagaagctgtctttcctggcaccccatagtaagacacggagcaactacattgcaatccattggtcagtggtgaagtaaggacggaagaggggagaaggaaggtggaggcaggggaggctaggtggttgtaggcctccttcatctgttcattggctgtggccttaggccagtttctctgatgtttgcactaacgtgcagtgagacagtccatcttgtctacctgtcttgagggtgtctgtaagtattaaatgaggtagttaggtgtgaaagcatttcaaaaagtgagaagatattctatgactgtggaggcttgttatgatggtgataatgatggtccctgagaattcctggtatatgaaagggaaacgcacagagtttgtgaaggaaagaggtgtccagctaacaggcttgaacatgtcaagtgtgtagctctttttctggggggaggggtgggagaacggagtcttgctctgttgcccaggctggagtacagtggtgccgtctcggctcactgcaacctctgcctcccggcttcacgcagttctctgcctcagcctccccaatagctgggattacaggcgcctgctaccacacccggctaatttttgtatttttagtagggacagggtttcaccatcttggtcaggctggtcttgaactcctgactttgtgatccacctgcctcggcctcccaaagtgctgggattacagcgtgagccactgcgcccggcctgaagctctttcttaatgagagcaggcagctctcagtggcttgggattgaatcatttccttgatggtgtatctaatcacaggggaggttgcagttgcctgtagtctctttctgggggacttgggatcacttctcagtccatctaattagaggaaataatctccaagtggaatttactgttggttaataatgccatgaatagatggttgggagctattttttagtttgtgtaaaatgctggtgtttgtatactggttttggttacaaaaatgaggtgctggccaaagagagacactattatggaggccggcaagaacacctctgttcattcacacccccaggggtaccagaatctggatctgctctgtgcatatccaatgtgcctttcttctcgtcaagttagggttcatcaggtaattctggacaagtacacactggacatagaactaaatcaagcaatcaaatactcatttcctgcctgtgacatgctttggtactgtgcaaaatcatttaaaattagtttctcttcccttcataaatttatagggtgtctgaggaaagaggactaacacacaccttggaatgactatatttaatttgttataaggactgaaaaagagaaagatcaggctgggcacgggggctcatgcctgtaatccgagcactttgggaggccgaggtgggtggatcacttgaggtcaggagttcgagaccagcctggccaacatggtgaaacctcatccctacaaaaaaatacaaaaattagctgggagtggtggcggatgcctgtaatcccaactactcgagagactgaagcagaattgcttgaacatgggaggtggaggttgcagtgagccgagatcgtgccactgtactctagcctgggcaacagagcaagactctattttggggaaaaaaaaaaaaaaaagagaagaatcagtgtggattggactccgtagtgctttgtgccagatgtgagatttgaatggagccttgaaggttgagaaagaatctgatataaccactgtctcctccctttcgaaggcacaccacacactttgggctcagttagtggttatagatgccttcagtgcattccaggagcaagcatttattgttttcctattatatgcctgactttggagatgcaaagaagaacaaggtcactgttttatgaatggccgattttattctccctgatgtggccagctgcaagcttcaaagggtggcatatacaaataattataggctggtgggacaagagctaatggcgagatgtccaaagatctgtgggatcgccaagcagcagtcaggggaagacatcagatctttataaagattttgctcaaatgtcgtgttctttagaagcaattgggctccatcaagcagacaacatggggaaattcaatgcaattcaagaaacatgtattgattacctactctgtgcactgggatataaagacatcatcatcatcaacagtgttgctgtattccaaggacataattttacatgtattattttatttaatcataaacaacttcaatgatacaggtgtttattattatctctatttaggtaacacattcaacctttagagaatttcgataacctgccctttcacacttagctggtacggaataggtcttggaatgggacctagatctctgagccctcgatgtccacacttttcaccagtaccctggtccccttgctcagagagcacctagaaaagatctgtaagcaaagaattgcaatacaagggttgatgcaatgtatgtaaaggtagaatttggcattaagtataagtaggaagaagtcattatggtttctttttttctgggtgagaggtgaaaacacttctgtaagaatatttccatttttgcaaaaacgtgggtaggtatctatcctaatggtaatactcagtaatggcattggatttcattttagcctattaaatgatttgattctgcatgagagcatttccttagagttttgatatctggagttctgaacagctcactggttttggtggaaaattgactattaatattttataggcttgttttgatcatttgtgatgctaagtgaatcacatctattcatagctccaagttttcaaattctgaaatcttttagaattgtctggttaaaaccagttctcttctttcagttcattagcttaccaagtgagccaaaaataaagaaaatcgaaatatattttccaattcaatctagaaagttatttatagttacccactgttatctctttctttaaaaaattttctcttttctttttatttccccccctctcttcctgagagggttataaacactgtgaatattttacatctaaatgctaaatcctctcaagcttttttggaatctatatcaggtgccagattgtcataataacattttatgaaatactgtgaataaacaaacaaaccaagagttagctcttcaaagccagtggttcataggctttatccagtacctggtgaacatccacttggccagcctctgactgcagtagatgtggactgctctggaccttggcagtcaagaggaagagagggaaggaaagcccttttatagttactagttcccttttgatcacacatcccagcatgaactgcttcaaagaaatagcatgaagagtggttagacgcccccacgggcccgcagcagcccattcaacaagaagcaaaagtaaaactgcttctggtggaatcagcaacattatagttcacctgcgggggcatcaggcttttactgcttgccttgggagtggctcatctcattttctttaggaaagtgagatccaaagccctgacttagaaacaaaagttttggaacacaaactctttgtaaattaggtgatccctaaacttaaaacatccaggcgagatgaaagaccccttaaaaaagaaatttctagccgggtgctgtggcttatgcctgtaatcccagcacttcgggaggctgaggtggcaggattgcttgaggctaggagtttgacatcagtctgggcgccatagggagactcctgtttctacaaacattttataaaaaattagggcatgatagtgcatacctgtagtctcagctactcaggaggctgagacaggaggatcctgttgagcccaggagttggaggctgcagttagctgtaatcacaccactgtgctccagcagcctggctgacacagcaagactctaggaaacaaacaaaaaaccccaaaaaacagaaaaaataaatttactgattattttaatatcatgtggtagaaagcattccctttttcgggctgtgtagcacactcttattggaagggaaggcatagatgctttgggtactctgaaccagggctctggagccttctcaaagccgttgaaatggttcttccgatgacattttgagtgggagcccctactgagaagacaacaacatggagctaccgtgattgaagcaggggagcgggggcaagcccctggcatctccaaacccccccgactctcctcatcttcccacccccagagccttaaggaaacctggtcttctgtagagcatggttttgaaaaaggctgcttaaaatgaagacaaaacaatagctactgcccacttagttgtttatgtgcttggcttagctatttgcaatcatgttgaaaataagagggatttggggctcactgtgctcttaaatggagtatgtgtaatttatgagggcagatacgatgaaagatggaaaatgataatggagagaatgcaaatcattctggaacctttgagtctttcttttgtaatctatgttgattcttttttaatcttccaggtttctgcagaggcatgaaaacgtggttcataggaagtacgataaatgatagtagtaagggtaagaagtaaaagtgatttctttttatagggaacataatagttaaacatcttttgggagaaatgaaggcacgtgtttagtataaacctttggaagctccagaaggcagtaacgtggcttgcccttggcacatttctgaaccttcttattttatattccatttccagagggttttctctcagttatctgtcatctaaccatccagtaagatggaccttactggtaaatattacctaaagcagaacctttctcaggggggagttgcatcttaaagcgtgtctgctgaagtctgacttccttcaaagcaaagaatccctgactgaagaactccattgactgtccaaagataattggagaattattttggatagcattgtccaaaagtttcaaatcccactctgtatgattgcccaatcttaaacttgacctaaatttcttttgccactggataccgattgcatgtcagattttggatatcctgcagtgagtgaaaccagatgaggcccttactctcagggggtttatggtctagtgggagagagggtggtaataacgtaataaaaaataggccaggcctgatggctcactcctgtaatcccagtgttttggaaggctgaggtgcaaggatcacttgagcccaggaatttgaggttgtagtgagctacgatcacactactgcactccagcctgggtgacagagtgagaccctaaatctaaaataatattaataataataaaaaataggaaaaattacaactgcaacaagacctgcagagagaatggagtgtattttaagtatgttttaaggcacttttggggagttggaggcctgcagacctttctgcagcagatgcataataaaatcttagaacagtctgctgtatcctgctcagctccggatcccatttccaaatatatatccattttccccattttttaatcctaggggactctgctcttcattgggttctttttgttttagatggagtctcactctgttgccaggctggagtgcagtggcacgatctcagttcactgcaatctccgcctcccaggttccagcgattctcctgcctcagcctcccgagtagatgggattataggtgcgcaccactacgcctagctaatttttgtatttttagtagagatggggattcaccatgttggccaggctggtctcgaactcctgacctcaagtgatctacccaccttggcctcccaaagtggtaggattacaggcgtgagccactgcgcctggccctcttattatgtcttatctcattggacaacttcagacttctaaacacaaacactgcttctcccgacagtttttgttgggttctgctggtcttggacaagaagccttttatgcttgcctcctaactttctcttttctttgaacgccattttggcagctttacacttccaccttttgattttccaccatttgatgctgtcttctgatccatggtaatgcttcttgttctccgagtaagcactttctcatgtatgtaatggttaaagttcattgggagaagcttcagcatgtttattttcaaggttttgaggcaacgtaaatgataagagattacgtttcacatagaggaatgggtgaatgtgaatgagaacttcaaaggggacatatgaattcactggatgtggtacatttccttcagggagcacagcgtgctaagcagatgttaactccaacctttgcgattccactcaccctcacagtttcccataagtcagatccccaccctgcccccacgcccccattgtacccctggataaaatgatgtaagagacaaaaatgtcagtagtgggagacaggaaaataaccaagatgttttgatttttgtgcactgctaggttttcgaccctttaatcacagggacctggtgttctactctcaaccctcctgagatgacctgcatccttttcatctgtttcccaaggcctggaaagttggtcctttgattccttcctggcccaccctacttccctttccatcattcccatagctgacggtggagggaggtgtgagtgctgtattttgggtgggcaggctctaggctgtttgttaagagtaagtggttcagagtctggtaactggcccttgtattaggcgtttcaatatatagtctatctatcgaggaggatgttttaaaagtattaaatcaggctgggcacagtagcttatggctataatcccaatgctttggtaggctgaagcaggaggatcacttgaggccaggattcaagatcagcctaggcaacatagggaaaccattgtgtttgccaaaaaaaaataacaaataaaaataaataagctaggcatggtggctcatgcttgtagccccagctacttaggaggctgaggcagaaggatcgcttgaggccaggggttcaaggatgcagtgagctgtgatcatgccactgcactccagcctgggtgacagagtgagaccctgtctctaaaattaaaataaataaataaatatatatatacacaatcaatgcatttttcatctttctctcacataaatcatgctctgccatcctgcttcacacttgtggccccagagagagaaacagagtgaagagtgagtggcactctgggaaggagggaagatggtcccacttgaaggggggcacctaccctactcccacttctggccatggtagattgtacgaagcaagcagaaaatcggagactgaaacatgacctcctctctctctgctgactgcaggctcagagatgaaagttgggagaggcagattaaactgccaaaagcagagaaaaccaccccacaaaatgtattcccaatctcctcccacctcagtggcagacttggggcctctgcagcatggcaggcaaagtaagaatgtgggttgcatttcccagaatcttagtctctcccatagtgtggaaggcgatggcagctgcaatgtgccttgtagaaggatgctgaggtgcttgctgggagctgccaggggcattgccattgcaggaacagtgtggccctggggccaggggtggatgtgcaggtggggagtagaggttagacctcaacgagaagcatggaaggaagtgtcttcagggggtaccgctaggctgttcctgagccaaggaagaacacaccacagggttaccagccacagatgccaacagatgccaacagatgccacagatgccaacagatgccagccacagatgccaacagggtgcctggcacctgagaggacaggagacaccactgaggccaaaggagttcgaggagagaaggagggaatgtgggcatgggtcccaggctttcttcttccttcattcacacactccaggacatcatctcagaggggaaccaggaagcaggaggaaatgggaattgacctaagctgactgtttcagttgttgaatggactcaatgcaaccgatggaactaaatttagttctttccacttccgtgtggtacggacttgtaaagaatcacagggcagctctaacacataaagaagcttggttttcttttgtatcagaatacgagtacatcgtaaataagttgctgacctgttgtatacgctttgattttattgggtaaatatagcactagaccagccacccagcgatctgggctctccccctgtccctgccactaagtgtgactttgggcactcctaacctttttcagggcataagatgtaggttgtagtaaaattccttccagttgtaatagtctctgattttagtacaaaaatgttctgcaataatgtctcaatgtagcaataaaagaacttgaaaaaaaactgccattattttttcttttctgccaaaatagcaattgtcaggcctgccatttcatttgaccattctctaaatagctccttccctggactggtctcagatattggctgaaggtcataattgggaggtcacatagatttgagggaagttgatgggcaaatcagtttcacattggaagatgtttaaagaatggcacaggacgaaagacaagaatagctacagtcatgctgttcattcactgatagcaactcatcatttaactcagttgtcgagcttcagtaacctacgttcaaagtcatttatgccatgttacatgacttcctaattagctcagtagatatttttcaagttttctatgtagaagtagagtaactctatatatttgtatacttttatgaaatgtcttattttagttttacttcctaatgctttcttatttttttttgaatggctttgcttgattatgtggtagcttttgaacttcaaaagttggtcttggctgggtgtggtggctcatgcccgtaatcccagtgctttgggagttcgaggtgggaggatggcttgaggccaggagtttgagaccaggctgggcaacatagcaaaaccctgttcttgcaaaaaaaaaaaaaaattaaaaaattcgctgggcatggtagcacacacctgtagtcccacctactcaggagactgatgtaggaggatcgcttgagcccagaaggtcgaggttgtagtgagctgtgattgtgccactgcactccagcctggtcgacagagctataccttgtctcaaaacaaaatgaaacaaaacaaaaacaaaagcaaacaaacaaaaaccatatatctcaattcagcatgtctctgtgatcccttatacagaggagctgatctaaagcaatcccatttcattaaattaacaggctcattagggaactattccttaatacccttaatcaacactcttaatttcctaacaatgtattttttgaaaggaggacactacttagacactactgtctcgtaatggccttaaacaacaaaaccaaatttataggacaatatagaattcagaaaaggcctcttggagataactctaggggtaaccagcagcctgcggtagcccttattgtgccctgaatgtttaaactctcatgaagtacatatatgtgtgcttaaaaattatatattttaagcagaaattatctagcctacttgtcattttcctttacctcagaactttgtttagagcacccattagcttcagaaggaccttcccaccggaattctctgggggccttgcaaaaggataaaaacaggctcaagaaattctgtagagaaaagatgactatgttaacatcattctttgaaaaagcttccgtttgggacaattgtattgtattctgaaatgagatacttgggcttccaaaatatgggttgtgctttgtaaaatggagtttttctcattacaaaatgttggaagagagcaattagaatttccttctctgcctccttccctctctcttgatttttggtgaagtcaagggtcaggatgatgctaaatcagaaattaaggcaacacaaatttgatcccaactggtagagctgctctggaccccttttgactgacactgagctcctgtttctgtggaatttttcttatttacaggaatccatgatctgtgaatgtcttctaagataaatctaataagcatctttagctactgagttagcttcctaagcacacagtattttagacaccacacaactaaatataccaattccaagcgatttacttatacaaaaaagtgaaatatagtaaaaccaagaattccattctatttttaattaggcagtcatagagcctcaatactgattcttttaaaaacctctagaatggctttaatgcttataaaccattaaaattaaaaccaaagtagctcttaactatatttctgctattggacagagaacatatctgttatataagttttccttagaattggataatttccaaggctttgaatctttttattctagaatattttattcttcataggaataccacttaatgtcttaggagtgtgtatgtatatgggttttttatatacatatataataaatattatatgtaatatacatgtatgtagatatacatataatatacatacattacatacaatatgcatacagtagacaccccttatttgcagggaatatgttccaagaaccctagtggatgtctgaaaactgcagatagtaccgaaccttataaatactgttgtttcctatgtgtatatatctacaataaagcttaatttataaattaggcacaggaagagattaacaacaataactagtttacattcccaccagcgggttttcactgcatccacgccaacatctattattttttgattttttgattatggccattcttgcaggagtaaggtggtatcgcactgtggttttgatttgcatttaccagatcattagtgatgttgagcattttttcatatgtttgttggccatttgtatattttcttttgagaattgtctattcatgtccttagctcactttttgatgtaaccaaataccatctgttccccaaaaatctgtggaaaaaaatttaaaaataaaaaaccacaacaataactaatagtaagatagaataatttcaacagtatgctgtaataaaagttatgcaaatgtggtctctctctttctcgaaatatcttattgtactttactcacctattttcagcccacagttgactgtgtaaagtgaaactagggataagaggggactactgtacatatatatagatatgcatacaatatgcaaacatattcattatgcatataaatatatgcatgtttttacatacatttgtatgacatctacctatacatatatacacacacacgtatataataatataacaaagttaacttggaaggacaatgttcgggaaagtcttgaaaacctgaaagaccaagaaaacatgaagtgtcttttcttttttgttatgaatggctaagtatgatttaattcactgctggacactctaacagtcaccttattgcaatttaagttccccatctgtgaattagctttgcagtctctgtgtcttttagttattccatatgttttaagaaatagcgaatgtgaaaaactgtaacagaaacatgtagtgttacttctggaagtgtggtaatgagatctttttcaaaatattactgattccagaggatagatcactcattctactatataacaagcacagatgtaattcaagaggctttacctgttttagtgggtctttctctgtgtagtttgttcattaatttaaggttttttatgtctgttttcatctttgtcctttgctgtagattttaaactagaggccagtgatcctatttaatttaatggttactaataaataaccacactaagcaatcgcctggatgatattgtgccgtcagatgataagggtgataatgtatgaaatgaaatagaaagaatggaaggtagtttcataaaaagcaagagtcttataagaatgaagaacaagacacttttctgacaggtggacagatgcttttccagttctttcttggcataaattacaaatggagaaaaaccttggtatttttggtttcaaacctttactagcaaagaaatctcactgaaggaccctccatacttcctgtaacttatctgtataaggctgctttaattatttattggtttaatctacatttattggatacctcctttggcccagccctgccagctcttgggtgcgggttgtgtgaggcgagagaccagcggctgtggggagagagggtgaatggaggaaagacctgacccctgacttagaggtgtttattgggtcccctcaaaatatattctcccaaattctgtgaacagttttttttttctgtatttcattcggctttctcctctcattctccactgaaatgtttatcctttctttgaaagaaaccccaaagtgactcttttcctctttccatggatcagatgccaaattctttgagaaatatgtagaataagaaaggatcctttacctggtttggaaggagctctttctgtttttctttccccacccaacacctgtgcctttttgtcaactatttatagaactcgctccttcttaaaataatgtggatcgaaaatggtttgattgcttcatggacacaggaagacttctccaaaaaaagcaactttcttcttattgttatccttggcaaaattaaatcatgtcgtaaacaatatcccaatcctcttgtcatccatcagactctagaagggtggctcctaatgcttttcgggtctcggaccactgtggaaatttggtgaaagccatgcaactcctcctttggaaaagttatggtagcctgctttagaatataaatgcagaagttcagggtatagtgaactccatcagtggaaccctagaaagtctcaagctttagcaggagtggctgggctggccaagggaaggaacagggaagaaggactggttggatttacaggtctcacggagagtggtggcattgtcacagaaagattatggactccctgccttctaagcacaattttattttatctccattaaaatattaactcttttggaaacatgaactcttactgccttaaaaaaagcaatctagcaacaagtgttaaaacctgaaagacacaaatacgttttgttctggcaattccactcctgggaatctctcccatggaaacaaaattatcagcatagaaagcgtaagtacaaggatgtctatgacagcaccgtttgtagtagcacaaaactggaaacagagcgaaaggtcatctgcaagagaatagtgagttacattttgataatctgcaccaaagaatatgatgcgatcatttaaaggaaggaaatagagctctatagccacatgccttggaggtatgcctgtgaagtgttgctcagtgagaaacacagatgtagaaaagcgtagagatgaccaaaccctctgtgtgtgcctgcgtttgcgtatctatgtctatatatgtttagctctgattaggaatatatgtataggtagaaaaatatggattaatatattccaggttactaacattggttcttggggcttacagggtgagcctagcaaataaaggaaaaaaaagattgcaatacttaaaaaaaaaaaaaagtgttagtatgtcagtaattcattgtatcagattatacttatgggtgggtagatgtaaaaataaataaaatagtgattttatttaatttattattattattgttttgagacacttgctctgtcacccaggctgaagtgcagtggcatgatcacagctcactgcagccttgacttcctgggctcaagtggtcctcccacctgagcctcccgagtagcggggatcacaagtgtgcaccaccatgcctggctaattttattttatttgaaaagatggggtctacctatgttgcccaggctggtctcgaactcttgggctcaagcgatccccccatcttgaccttgcaaacttctgggattacaggtgcaagccactgtgcctggccagataatggttttaaaacagatttgcttatgtacattttaaattttactgttttacttcttcacagtcagtaacactgaggctttaccattcaggctgctggggactaatctggccaatttgaccagctgggggtctccctgctgatttcttagatgggtattctgtgacttattgctctaaaggcattaggtcttttagcaaatgtttattggatgtctattttatgtcatatactaggccttgtgctccttaaagaactaaggtgtgagtgtgtgtgtgtgtctgcacaagtcagggactgttaacagctgcaattgaactttctgtcctcaatttggtatttgtctgtttatttggttgtgagcgtgcaaaatggagggcataaggtgttactctcaggccagtaagaacctaagaatttgtttgggtgaggtcttgatttccttttttgcctctattaaatggcctacccttaattcaccagtttctccatagaaatgcctaaagaccttgagaggttaatactgaaagggttttagaggaaaaagaaaggtgagatgctttctgtgagtcagtgtttctccaaatagtcttttcctgcctacctgtatgcatcacagttacctagcgaatatggtgagaatgctcattcatgggcctggccccagacccactgacagggaggcccagaaatctgcattgttaattctccaggtgattctttttttttttgagatgagtctcgctttgtgccccaggctggagtgcagtggtgcaatctcgactcactgcaagctccacctcccgggttcacaccattctcctgcctcagcctcccgagtagctgggactacaggcacctgccaccatgcctggctgattttttgtatttttagtagagatggggtttcactgtgttagccagggtggtctcgatctcctgacctcgtgatctgcccgcctcggcctccgaaagtactgggattacaggcgtgagccaccgtgcccggcccaggtgattcttatttacgcttgttaatatttgagaaccagttccatagaacgtcgtcccaaataatgaacactcctggcattttttttccaaaattttactcttttaataaatttttccaatatttcaatggctttgaatttttatttttttattaatgatgcatttattcataacgatgtctgcattttagagaagtgttcatgaagaagaaacttcttcaaacaacactgttgttaccaaatatccactgcattcttaatgtaaaggaatcaatgtaggtcagttaaaggctagaatggtttaaaaaaatcaacaatctgatgctcaaattcaaatgtctttaatatacacgtacttatgtgtatgcgtataagaaaaaatttcaggttacaatgcattctgttgttttgaactacaggaatcaaaccagaatttttagccgtgatacacatttgatacattcatggattcttgattttttggacgacttttggtttgtttataaagttccataatagagacaagaactgaaagggtttttcagatattttttattccctttcatacatttcttccccaagaaatttagatacgttttgagattttcataaaatcttaaaataattgaatagtttaagcaaaggctagttcctatgaaaagcagaattatatgacaattttcctacattcctcatgtgattgtacctgtgcagagaacaaccctattctgattagaaagatcctgcctgagaaccttttagcttcacagcaggatgtgtacaaccgaagtcgattcaagaaactcatgacgtcatccctcagtcaataatcattgattgaatagagttggtttcagatgtaggtattaggtaccagtagggatacagaaggaaaattcatggtttccgtctttgaagaataatctggttcagaaaatagttcaaatgtgcatgttttgacatggcttcataacaaaagatcctttcaatcaaaatgctagggaaaccagcattaaaggagagattgtggggcaggcgaggtgttggcagcagggacatgggttgtcaggagacaatggaacagaaacaagacatgagaaaaagtgtgagcttaatccataaagctgtttccctccaaaggtgtcagctgcatggcgtgggaggtcaggcaagtgggtctgtgttccccagggtgggagaagcattagtagaaacaggtgatgaattccttaattaggatagggaaacactgcagaagagctgtggtctagggattttatgaaatgcaaagcttggaaaattaaagaagcccaatgtgaagaagttaggaggcaggatcaaggtggctgtgaaaacagagaagaaaaacttagagctccttttggagaaaatgggatattagggctaaatttgaaaaaaaaaaaaaaaaaaaagccacataatgaaaatacctgtgatgttattaaacccatcatgatgggttcagtctaaggcattttaaattagagtgaacactgtgggtagtggtgtgaaagagacctcactaattgatgatatggtttagctctgtatccctacccaaatctcttgtggaattgtaatctccagtgttggaggaggggcctggtgggaggtgattgaatcatgggggcagatttcccccttgttgttctcgtgatggtaagtgagttctcccgagatctggttgtttaaaagtgtgtagcgcttcccccttcgctcgctctctttcgtactccattgtgtgagggtgtgctggtttcccctttgccttctgccatgattgtgagtttcctgagacctctccatccatgcttcctgtacagcctgcagaactgtgagccagttaaacctcttgtctttataaattaccccgtctcagttctttatagcagcgtgagaatggactaatacaattttaaatctttaattttctgttgatttataatttaagaatttatttctgtaataaaatacaaatatcatctaacagacctttgacatggtaaacattctacagcgtaggataactttataaggtttaggtagtaggtggtgagtaagtgctagatgactgaattctggtgtttatcttggaaagtaatctgcaattctatatgacgttttttcctgcataggacacgaagttctgctacaattatttaggaataactttttttatgactcatgttagtaatattactgtaaatcaacattttaaaaaaacaatgtttcatcaccataaaaaaaaaaaccctccctccttcccacatcaaggatatcttcctcttgtctaagaagcacctactcctttttggaggttgacatttacatcgagcgagtacctttcatctctgaaaaagaaaaagaaatacgtgtagaaaaacccaactaactaacaaatcaccttaattactacctgcagagaaaaagggttggctttatgtttcttttttaattgtgtgtgtttttagctcaatccacaaatgagaaataagtgttggtggaaaaacagagaccagttttgcttatatatggtgtggtgggtggagagaaagggtacatcagattgctacctaacagagcgaggaaatcagttcttattttccattagaaaacaaaacaaatggcaattaatccattcatgtctgaggttgcaggtttttgaatttttgcaatcagaccttggcgatgaccttgagcagtaggatataaataactcccacatgcttagagttccaatgatggaacactaggcataaatgggctaaagacaaaaaaaaaaaaagttgtgagtatattgacttcccaaggagcactaggcttctgcaataagttcacctgtggattgcgtgttagttacctcctaattactgaaaattgagctttatcagtagtggcatgatgttccttggggtttctttccctggagtatctgtgataatgccatagcttgtcttgcaaatcatttattttgctaggctatgaaatgatgtccaccttacaagttggaaaaatctttctgataggaagaactctggctgtgttccacctccctggattctctgattcccagctgctacgtggctcccagcttgtcccagggaatgtctgtgggacaagacattctctttacttgccgattttcctctagcactaggtacctgttttcacctggaatgtgacaaccaggtgctgttagctttttgtctctggcggtctgtcggctggctggacctggggaagcaggcaatagagtctaggcctggggttagactagcattttcctgaccacctccatccctctgacatcttacctgctgctttctgtggagaagggaggatctatacaagctcatggggacctgcattggtttcctgagggaactgcagatgattgggtgtgcaggagcgaattcctgaccaggaagtcaggaccctcctgtgctggctttgtctgcaggagaccagctctccagctctatctgggcttcttccctttttctctgcccttaaatcccaatgtggcccttcctggccatcctaccttttttctctcccttcaatgcacttgatttctctccagtgaatcagctttcttccatatcttagactgcaaaaacagcagagcatccagaaagacaagagacatcttacctgatgtcatctgctccattgcagtcttttgctcactttgtcattttggggtgttgctttctcgttttgggagccttatttctgtttgcagtaagtatttaaccttctatctcaaaatgttcagagtttcaatttaaacaaattcttacccacttgattttatttttctacaaatgttttgctccttcctttgcaaaggctggtctcctgcttgactcatttacctgggaatgggtggcttctctctctttagagacctctgttctttgcagaaggtcaacattctgcaaccctgtgtagatggggagggataaatttgtttggccaggaaaagtcacttttgacaggggactaatggggggaccagaatcccccctaccatagtgcagcatgggacacaataaaccaccccatccagctagcactcagggcctctctgtagctatttcctggggccatgctggggccatatggccccttgagggcagggcaataatctgttgtggtagctgcagctccctctgcccccctctggccccccatgccccctctataccccctctattccccctctatccccctctgccccctctctgcccccctctgcctggctttttccttgccctagtggccaaagctcttcactagattcaccgaagatggtgacactgccacgggccgccttccaaactacaatagttcgtggcagcagtgaaagcttaattttttaaaaccttccatcagaggaggaagtgctttgtagtaaatgactacattgctggaaatcacttactggcgtcgtcttgattatattccttagtcattacggtttgcatcacatgatcttttctcaaacatcagcatggggaaccaacgatgaaattgcatttctttgaattagagtatagattattatgggagaagaaagacattaaaggagcagcgttcatgtttatgtttgaagaaatacgacaggcttcacagcctccacggcagttaaagcgggggttgtaagagaacatggagccatcagacctcattgccttagataggtcccagtgagtgtagggaaaatgctttggcttttacaaccctgggtatatagatcctggatatagaatcagtttggtttgtatttctttttcttttttcttttgtgaggtgagacagggtctcactctgttgcccatgctggagtgcattgatgcaatcacagctcactgcagcctcaacctcctgggctcaagtgatcttcctacctcagcctcctgagtagctgggactacaggcatgcatcactatgcctggctaatatttttaaatttttagtagggatggggtcttgccatattgcccagacttgtcttgaactcctggggtcaagcaaccctcccaccttaccctcccaaagtgctgagattacaggcgtgagccactgcatccagcctggcttgtatttcttgtggggctgggagaatatagcatcactgcaggtcttctcacacataattgggcaatcaataaatgattgttggaataaaccagagtcttactcagagagtacgcctttcttccctgacagcctttttttttttttttccccccacacacctctgggtttctgtacagtttttgtatggtaaaagccaaggatttggaaatttttggtgccgcagataaaaataaataattcaaacataagtctgggaaagggaatgaattattgtttgcttggacttctttactggctctgactccaggccttgcctaaccctgaacacccagcatatcttcacttgttccagatggcggatcctgttttgttggcggcccccagaacttgctgcggtgtgaccttccatccttgtcatctcacagtcctcatgatccgtatatcagactgacagaagttagtccatagacaaacaaagtgatcgaattaagggacttcattggggctagttgtgaattcagattgtgacttttagggggtgtcagagttgacatgttgcagagtgttcaaagcaatgccagttggatttttaatgtaatatgcagattggatagtattattgctgtgtgcattattggaatttctattcttcctggccatctgcttggttatatatgtcttaattctgatgttaagtatgagatgtagacgtagcatttttatggttctaccatttcccctgccttcttttatctgcacatttcttgaagcagccaggagccatggtttctaaatgcctattgttgagagccctggcaagagtggagaccttatctttggattccccatagattctagatgaatgaatgagttattggaaacaataacagacattatttactgggagttaacgatgagccagttgtttgctaaggctttttgtagagtatctcatttaatcttccccatacctttcttaggttagcatgattgttctcattttgtagatgagggagctgtggctcagagaagtcatgtaaactgcctgaggccacacggctactcagggtccttgctaatatttggcctcaggactttccgactccaaagcctgagatgtttcttattagctatctcagcattgtcattattatgacatttctgtgatttccataccgtatcgtatcagtgatatgacattttaggtttaaaattctccaggatctcttcattaggtgaaatttttatatttggacttttaaaaattgtgatttctgataaatagccttttattgtatttaatttattttttggctccatttgattttcatcattcctgaatgtttttaatacttttaattaagttatgtagtaaacttttcatttggaggtcaatgattttagccagtttattattttagcagcactctgttttgttggctgtacccatcttaactggtattgaataaatgtcctcatgttttctgagcttactgatttttaaattcaaattctgtataggatcctatctcaagcatctaatgttttcagttattgctatactactgatcagaacattaccactgaagctattataaaaccaatgaaataatatattattcacatttcaaaaacattttaaaaagtagatctgatcatagaaagtacccaattatattagaaatttgcttttctgtgtaatgatactttgttaggaactggttgaacactttaatccatagtgcattgcagggttggctactaatccgaatcctaaattcttcaggagttctgtttttttttttttttttttttttttttttttttttttttttttactgagactgtgcgtttatttggtgtggtttgcggctgtagggatgggggtacctaatggtgactgtggccacttccttccccaccttgccccccttggcagtgccatggggagagatggaagtctaatgccactgatgccttttgagattccagacctgagtaacagggactgttactggctgtggtcagagattgagagggcagggagcctgctgatcccattatctctgcaaccccaccattgtaaatgtttaaatgaacaaaggattgagtgagtgagtgagtgagttcaggattaggattaaagagtttggctattatttaaggggaaatgactttcatactgatggacaaacagtgatagtaaagtaaaaaccaagtagtgaccaaagctttctaaaattatgttcagttacagtgtagaaagatggatttttgaaactaaatgtttatgattatggataaataacccacattttatagattatgtatgatgaactgttatccagtttgaacatttatttttcaaaatggccgaggcattgatcaattgcacacacgtttccaaatgtattctggggtttagagagagaaaaagaccagagaaaaaatatttgcacaaaaacagttagtattgagagttggaactgctttttagatttttagatttaccattagtcttgatattgagggatatcaaaaatatccctgtaaaactttctggctgtttttaggcagtccatatgatacttttaagaaggtaacttttgcagtttaatagcttcacattacagtctagccccctgagaactagtggaatgtgaaggaaagagtgagggttttggaacaagttaaacttgggtttcaatttgtctccgccacttaatactatgtgtcctcggacaagttacttaaactctcattttctttattttagaatggtgatgtttatctctcccaaaaggttattgtgaggttggtgataaggcatcgatccagtagacctaggacaatccttggcacttccaggcacccaggaaataaccacaatcactgtcttcaggatactctgcattttcacttcgctgtctataaagtgacattgatcagtgttgaaaatgacagctgttattcttacatttgggagtgggatggcaattgcaagtaaaaaagcattctggaaatcatatccccaaaatttgttagtttgccctaccccctggggaaaaggcctctcctaaaacttcacatgggagaaccttgaaagcgtatcacatcgtagtggcacattaaccgattttgtttcacttgctgtaagaagcatctagaagtctccagccttctttggtttatgctgtgtctgacctgagaacccccattagtattgcctgagttaggagccagaacgcgctgttctctaaaccttgctggcgaagataagttgtgtgaaggaatctggccacagaaggaatcttataaaaggtactcttcctttataagattaaaattggaagtatggaggtgcagattttttttttcataataaactgtaaaggaaaaagaattagtcccacaaagggtaagttggtgggtacagcagtaagaattgctgctcacaacatctagctcagagcgggccttccccactcagaaataattattttcaagccgagcagcatctgcagaggtggctcggcaacagctgcgtcagcttcagcatgtgtgaaaactgctcaagaataaaccctgaaagtaggttttggaaatttaaaaaggaattcaaggatgttttgatgtggagggtttattagcaacagtttacaaaaatatagagcagtgaagttgggagttcatttcgtttctccagcgtcctcctatttatcttgctgatagatttgtctgctcggttaccatagagcttctcattggtattcctcagcgtgcggtgctgctgcaaatcccctcataattacactgaactggaggatctttactttttaggccttcctcatgctcagggaccctttttccttgtatgtggcagctctcattttgtacaaaaatgacagtgattgtcctgcaccgaaaaggtgaccaagcagccgccttcacacggctgcaattgctaatctgttgccttcccaagaaaacagcactagctgctgtccccacccccagggactggaaacatcatttttttatgatgtctgccctgcatgccggctctgtcagctctgggctcctgttctcagagactggggggtgctgtacatttctcagaggggaataaccatttcttttcaagatcattttcccttggcatttttccctgtcctgacgttcagactttgcttcaaaggtgaggggggtccccatgccctccgtgttttctccaacccaatgtggatgtctgtggttggcttttgggagaggtgtttgtaagcatttttagttacttttgtaagttaatttggtataactacagttgacccttgagcaacaagggtttgaactgcatgggttcacttacaagtggattttcttccctctctgccactcctgagacagcaagaccaacccccccctctacctcctcctcctcagcccactcaacatgaagacaatgaggatgaagacctttgtgatggtccatttccacttaatgaatagtaaatgtattttctcttccttatgatttccttaataacattttttctctagcttactttattgtaagaacacagtatataatatagagcatactaactatgtgttaatcgactgtttatgttatcagtaaagcttccagtgaatagcaggctatatgtggttaagttttttgggggaccaaatgttatatgcagatttttgagtgtacgggggggtcaatgcccttaatgcctgcattcttcaagggtcaactgttggctttttatattacggccaatggaagtaattatctttgagtctggattttgaatgcaaaaagacgttgaattagttacatttgaatcttattcattaattaatgcagtgatttttgaggcttgaattaatgtatattatagacgcaattactctttttggatctcatagatgaaattcattgaaagatccccctggagttggcttccctgtactttgcctctagcttctcttatatggaatcagcttcaagttcaaatacattttgtctgataaattgactacacatggagagactaaagagagcaattaagtatgacataaaataaatgactcagtgaaaaggtatattcctttcaggtcagcgtaattcaaagtgtgagaaaacatgatttagctggctgaactgaaagacagtttaaattacgggatgggaagaatcgctttgcattctgaggttcagtaattggagttatgtaacattttattttgtctgctgtgagatgattctgttgtgagatggctgcagttgtttatgtggctgtggtttaatttgacattgtgaggggctggtctgacctttatgagtaatgtgcggtgcccttgggtgagatgacgatgggtggctaaagcctgttaagctgtgataaaccaatgtattatattctttagagagttagttagggtggcagtgccccagatcagggagtaggtgcctctgtaattgtcgaagtgttttccttcccttcgtcacctccccctttttgaatcgtatgcccacatctttgccatgtgactctgtagatcttctattagagaaggtactgttgccccattggtgttggtcatggtcatgtgactcttgccagccaatgggctttgaacaaacatgatactagcagaggtcttagatgggcttccatggcatccctgcaacccattgtgagaacatgttctgtatagctgccgtctagcagggtgtggagacatgtggagcagaaataaagccaccctgaaacctaaaactaagtagactgtgactcatgagcaagacgcgtgaatgcctattattgtaagccactgacttttgggctagtttgctatgcagtataattgtggaaatagctaatatgtgtacatatgttaaaaattccctgcccttgtaagattttcatttggattaataagctccttttacatttagatccttgttctcaccttaccagtaaatcaacgtcattcataacttagtggtatcttttgcctgcaatgtggtaatgtcctttgctagcaaaactttcatgaccagaggttgcatgaatatatcctcttaaatattaatagaattagacacccctatttaatcttttttctttgggattttacatgttttaaaacgtcacgtagacacgattgttttaaaaagactttgaaaaactccctaaaagactttgtagttgcaggccaggcgcggtggctcacgactgtaatcccagcactttgggaggccgaggcgggcagatcatgaggtcaggagatcaagaccatcctggctaacacagtgaaaccccgtctctactaaaaaaatacaaaaacaaaattagccgggtgtggtggcgggcgcctgtagtcccagctactggggaggctgaggtgggagaatggtatgaacctgggaggcggagcttgcagtgagcagagatcacaccactgcactccagcctgggtgacagagcgagactccgcctcaaaaaaaaaaaaaaaaaaaaaaaaaaaaaagactttgtagttgcaaatgactgatttcattgtagttggcctacggagaaagtaaattttagtagaggatagtaagtagctcagggaaggaaggcagctcaaggcgagggtaggagagctaggtctggaggctgagcagtcagggatagggctctcaaagtgcatagtgaccgtcagcaaggaccctattaaatctgctgataagaggtcacagctcctgttgctctcatgggtttctgggtcctagaacctctgccactggggcctgtgccacccttgagcccaggagcctctgtcgtcactcaaaagaggaattctgcatggtgcctgcttccccatgttctctttggaattaaagactcttatgggtccatctaattcatgctgcctaggtcacatgcctgtgtctgaactgcaagggcggttgagaaagtatctataacttcaacctggtgagaggcaagacttaaaatgtggaaaattgatgaaacttaggaatggcattcaaaagatgctagatagtcataaaacataaaaaatgttcatatacatctgtaatatctatttttaaaccaacgtttaattactactaattagcaaagtaatttttaaaaagtgaaaatgtaatttatttcattacttttaaaaacataaggattagcattcctaccaaaaagatacctgcattcatgtttatcacagcaccattcccaatggcaaagacatggaatcagcctaggttcgtttcagtggtggattgtgtaaagaaatgtggtacacatacaccgtggaatggtacacagccataaaaaagaatacagtcttgtcctttgtagcaacatggatgcagctggaggtcattatcctaagcaaattaatgtgggaacagaaaaccaaacactgcatgttctcatctgtaagtgggagctaaatgctgagtacatatggacacaaagatgggaataataaacactggggattccaaaaaggggagggggggagggagggagggagcaaaggttgacaaagtattgggtactatgttcactacctgggcaatgaggtcattaaaagcccaaacctctgcatcatgaaacatacccatgtaacaaactgcaccggtacccctgaatataaaaatagaaaaaaattaaaaaaattaaaaacaaaacaaaaaaaggaaaaatgagcatttatataaacaaattaaaaatctcagtagaacctctggttttataggcatacatttgtcagctgggcactttctttaaaacagtcccaaaaagcaaatatcagggaaaattttatcttttccatgaaaatctaattgatttaaattttgttcaaaatttatgataataaatgtgactaaattgattgtcaatttcacaatatgacagtgtttataacactgtcataaaaattttcaaactttagaaccacctatttatagataatttttcaacattttttgtcatcaagctaatagcattttttttttgagggcttgacagttataaatgtactgtaaaaaatctcctatatacattcttcattaagtcagagagccaattccccatttaggaaataggaatgaagtctagaacatttcatttgctgcagagaaaattgttaaatgaaccaatgtggaaatatctcatacttctctataggttttgtttattaaattatagcccctgtgtccctgtagagaaaagctgtcaaatgtcagagtatgtgttagggatgctaatttgttgtatagggcagagcttgattgatggacagcgtgcaaaatagagtgcccaggtttgtggactgagtagtggggcaggaagaaagggaaggagaaaagcaggatgtggagaggattttgcagtcagattggtaatgagaaaatcagagcagggatgaatgatctgaaaccaagggattatctgctggatgtagtaaatagtggcaagcattctttctggctgaagattagtgactgagtcacactgggtgagacagaaagaaaaatgtcattttgctaggctggctaagctgcatttagtgagtaattttaacttgcataaattctctgcacagtgttggttctctgagatatctttggcctggaggtaagtgtcttagtttgggttgttacaacaagataccatagactgggtggcttaaacaacagacctttatttctcagtgatttggaggctgagaagtccaagatcaaggggccagcagatctggtgtctggtgagggccctcttgctggtttgcagatggctgtcttctctctgtatccttgcatggtagagagagagagagctagtgctgtggttttataaggacactaatcccaatcacgaggtccctgtcctcatgatctaattacctcccgaaggccatcaccttcaaatatcatcacactggagattaggcttcaacatatgaatttggggaggacacaaacatagctgtaagtgttgttaacatttcaaagcaggggttttaagctttttgtatgccatggacccttttggcagttgtataaagtttattggctgctatttagaaaaaatgtttttaattccattaaatacaattaatcacatggaaatgaagtatattaaaatatagttatcaaaatattaaaaaataattcataatagaataatatggcttcattattaagatgccaaataacataacttcaatttaatgacaagtataaataatacttcaagatatctgtaacaactctaatgtgacaggaaaatatttccgatttttatcaatgttaacatcacaggttctgctcatatttcagcagtaattggtatgctaaatttcagttagaggtgagtaaaaataaagatgttctttttccccatttgaatttactgactctttgaattttatccacagcccaccccccaacctctgcagacgtcagggtaaggacccctgctccaaaagatttactcctgtaaatgttcattgagcatgtgatcctccaaggaacaagaatccctcagatataatggtcataaatcaaatgtcaatataagtggggttctattgctgggccttctgctttgttctgttgatcaatttatctagtcccatgctagtacttcatgaagtttttgtaatatttttcttctccagaaaggccagcactcccctcctccctccctgtcttctcacacttcataaatttatggtttcttttggttgtttattcatccatataaattactgcattctaaaaaaacattttttggaattttggttggagttacgttgaagctatatatcgatttgaagactatgacatatttattgaggtttccagtccacaagaatggtatatcatcttttattttggttttcacaaattgctaatgaaggctaagacatgttttgaatgatcacctttggaaatcatttcctccaaaaacaaaaacaaaaaacctccccaaagtaaagttggattaaatatgtttttaaactaggtaagttggggggaaatggtgattttaagattttggctgcctcgagagacaagtacttaatatgtacccatctcccaagattacaaatcttctattcatttgtactaaaagcatcactttagaaaattgaccacttatttaaataagtgacaaatcagattctggcagcaaaaattcttaaagtaatcatggttttgacatttactgtaaattcatactgataatatttagttatgaaaataagaactgtgtaaatttcaatggaccaattattcattcagcaaatatgtattgagtacctaatgtgtgccatgcacttctctatggactgggatgcagtcaagtgaaggaaatcattcaagaagggtcggttcaactctgctcaaatgctcccaagaagttgatggcagaattgcccaatggatttagcaatgtggagttcactggtggctttgccaagtgtggtttccatggtgtggtgggacaaacatctgcttgcagtgtgctcatgcccaagtaagagaagagaagtcaaagctgtgaatctggataactatttgaggagtttttgctatagagtagcagaaaaacagggatctaggtgacacagtatgtgtgtatgctaatggcagtgacccaatagagagagacaatttgatgatggaggagagagaggttaattctgggggcaaagtccttggctaggcaaggggggataggacttattgcacaatggagggaggagttggctttagctaggagccaggacagttcatctgttgaaacagagacaaggcagagggttggtcaatttttttttggtgggaaaatgctaaagctttcttctaagtagtcccatttttccagtaaaataaaaattattatcaattgaaaatgagtgaaggcacagatatggaatgttgaggaggcagagtaatgtggaaagggtttttctgaggaatgggaaagtcatggactcaggacaagtcatggggttgccagacatggctaagggcttagttgaaatgatcataagctggagccagagagcatggttatgtgtttttctgtaccacactgggccttttggatacaacgcagagtaggaagagattggattttaccagaattggggttttgctaggagagtcccacagacagcagaaggggagagtatttgaggataattgattttgattggtgttacattgaaccatatatcaatttgaggaagacttgacatatttatccagttttccagtccatgaagatggtatatcatctcataaggaagtaaccataatgctgtaccatggaatataagtttcatgtgaaagaaatgaagctgtggagactggtgggcaattccagtaggtggagtcagtggaagtcctagtgatgtcagaggattgttgaagtattaaaaggagtgagtggaaaaataaggggtgctggtacagaaggagccctggaaaatctccttccatttattcctgagtacttgttcattgcagttcttcctcaccatgcagaagttagccttggtcttatgctctaaagaaaatgccccgcattgctataatcccttcagtctcagatggatcctagtatagactgagatgcttgaaatagatttgggaggcagcacagctattggcaccatgctccagtctgtggctctggtggtgggaggcagagctgagtggaggatatagtgtttgggagagggggttaaggattgaggagtgaggatgtggagtgcattgcataagtgacattgaggtcactgagaaagcacaaagaaaggtgaagaaatgagaaagattagatgaagagatgtggctggagtaatgggtgtgtcatccagcaacatgtatatcaaaagagcagggaggagagatgaacaaaggcctggaagcagcaatgggcaggaatggggtcatccaactcaacttgttatcatttgaggggcttcaagggaaacattgtccttaggaaatacccactcagggtttggttagaatgaatgctatatgtgaatgtcttaggaaaaaaaaaaaagaagcaatgatcttgtttgtaggtttacccataacggtcggtacagatagtacatatgcaattatagcaacatggtataatagcttagaaaaatacattaatatttttacccatttaatccacatttcatctagcaaatacctgagaaatgtaatatcagaaatgaatttctaaattcaaataacgatgctttacaattgctaaaataggactccaaagatagtaagtcgataacatttttttggtgggtgttgggggttctgtgctaacaattccccatagctgaatgaaataaaaagaagaaaagaagttcctgtgaatataaagcagatgcttggatttattattctgatgctatttggagagagtatgtttttctattgtcagtctcatttcattttacattttcaagttttatttaggatctatcatagaaattcatactcaagagaaaacaagtttctctgtcatttatttaaacatgaaatgagaatgacttgttcattataatttaattgatgctagtttatttcaagaacctataaattgtacatgtgtgcatcaatgttttgatatattaagatactagggaaacacagaacttatttttgaaagggattttaggtatcatttgttgaaatcttctttagccattatttaggaacatttaaggcattggaaggctggcaaaccttgagcaataattagctgggttgattgtaacactaataggcattaagttgctcagttaggatctaattgaaaagtactttgggaattttgaagggaagcgaagagttgctgaattatttttggcttaattattttgcttaggtcaatgagatatgtgacatttccattactgttagccctattttaaaatctgtgtttgttttggagtaggctaatctagttattgcaacagcggaaccaacctttgaactgttgggttgctttgcatgaattatatatatggtatgatatttcctggttatattgtactaatttggaaaaagcacctatacacaactgcatatgtattagaacttggcaggaggacaatgaattatgatgtatcactgcctctgatgtattttccatttagcacttgacctgcttttatgtagttgcagttcatttctgccttgtagagcagcgtccattctccatgcttgtaatgccaccaggtccagagtagatcaaatccccttaacctaaagggatatgtttttaaactttttaattcttgcacaaataattttataacaacaataatgaaaataaaaatctgaactcacctgtaggcccattctctaagaatctaatgcatcaacatttttattttcctgctggtccttttatatagagatgcacactggttttttttaaaaacataattttcgttatagctttcacttacctttttagacagagctactctccatcctgaatattgtatgttcagtatagctgcatactagtagattgtgggaaataaataaatagtatttatttatttatttcaactaaaacagtagagtgttttcactactaatagatgtttctgactgcctgaaatgagtagcaggattcaaggagcaatgtgactggtttgtcggatatttaattagcagcttagattgagatttcatggtaatgagtttttttgatccatgttctggtattttatatgaagataatcttattagaatgttagagactctgaataatatgaagataatcttattagaatgttagagactctgactaaaaaatattttttgaacaaaattttttgtgagtgggtaaaggaggtttccttgaccacctagcctatgaggttagagttgctgtgatccatttgaggttgaagggcatggggatagagttgctgtgatctgtttgagattgaagggcattacagatgtggggcattttcttcaccatagcggtcaccaacctttttggcaccagggaccaattttgtggaagacagtttttccatggatggggcacaggatggtttcaggataattcaagtacattacatttattgtacactttatgtctattattacattgtaatacataattaaataattatacaactcagcatcatgtagaatcagtgagtgccccgagcttattttcctgcaactaggcagccccatctggggatgataggagacagtgacaaatcatcatgagagcatcagactctcataagaggcaagcaacctagattcttcacacgtgcagttcacaatagggttcgtgctcctatgagaatctaatgccaccgctgatctgaagggaggtggagctcaggcgataatgggagctgtggggagtggctgtaaatacagatgaagctttgccagctcacttgtggctcacctccttctgtgcagcccggctcctagcaggccatggaccggtaccagtccgtggcctgggggttggggacctctgctttacagcataagaccaaggctgacttctgcttggtgaggaagaactgcagggcccaagtgcacagagaatgaatgggggaagacttttcagggctccttctgtatctcacaataaaaagaatgactctgccttgtagaatgctccaattcttcgatgttctggcttaaaacaagtcgaatttcaactaggggagagacatctcattgtcaaaacctgatgagacaaaggtcctctcatgtgtcagactgaaaattttcaccaatttgccttctctctagaaataatagttttcgttcaatattttattttgtcctacatgaaaaacataaacaacattccattcctctagattatttagttttgtcccttggaccctgtcaaacaaactgacaactacattattcctatagcttggaaacaaataattttgttattaagttgagataacatcacgatagtttgttttacaatgatggtggaaatcaatgtagcatacacaagtttgatattagatttttactatgtgtttttggtgtacctgtttttaatataatctttactttttagaagtttggagctttttttttttcaggtacattttctgttggatttttggatgtttgcctgcaaaacttcattattaaaaagtacctttccctcccttgtaggttttgattaaaaaactaattattgggtgagctgtttaatgtttttaccttttgaaaaactacatagatttgcaaaatagatatattagggtcattactttctctttaaaaaagtaattgctataaaagaattttaaataccagttccctgaggcattttaaataggacttgattaactaaagtgtaaattatagtcatccaggatttcttagtgtctgatgattttagccatttttccttattgtacatgtcatgtgtagcattttcctggagactctcataccaggggtaagtgtatatgtctcattagtttgtgcctaatgggctgctcagttggcctagccaatattaatgaggccaagttttgggttctgtccctggacacaccaattactttaatttctctttgccttgtacacaattagactgcgctagttatcactggatgcttgtgaatacctatggacagatattttgggtacaacgatttgcaatttgataacaactagtaagtttattgccaaataaaattggaatacttacggaaagagaggtttttccagattcactgttttggctagccaaagattaatcagaaaactccctttatttcactgatgatttttgaaaatgattctaccataaatcaaaattaagctatcattggagtttagtgcatacttttgcgttgaagtttagcacatacttttgcagtacactgattttatgtgtatttggtgattattataaatggtctcaagataattgttctatctttcatggttaattttccaggcaattctctggaatgaatcgtaaagtctcagcattctacaagacttatggagattatctaatttgattttctcacttcctaagtgaagagacatgcttctccagatagctgctaaggtctcaccatgggataggcccagctccaagttggaaattcaggatttttcaccaggttgccatactcccctcttcggttcccaagggttagggtacctaccttaccctacccatcctataagatcagcttccagccttcacattttctttattttttttgaaattagattgtagataaaacattctagtgaatgttctgaggtcttactgtgatcaatttaaatactaagtttattgtcaagcttctcaaacccatgtaaaacttggcattcttaagatatgattgccctgatatcagaaattatcttttatcccttttaatagacattactaaacaacactatggttgaaaaataaaatattaaaatgactggaaaaaaacaaaagatagtgagaaattttttgggggggaaggccatactaagaacttttgaatacctatggtatgctaagtgattaaaagatatcccaaaaggtataagtaagatgcttgtcagttcttgcttttagggtttttaggaattttgcataatccagaaaacatcttttcaacagaaatatagaatcagtgaatatacacagctaaatcacagttatcttgttttcagtcattttgtggaattattctctcctctgaaaattgttttaaataccattttagtgatattatagtgtacttttaaatatgattatcaccagaagctcaaatagtaacaccccagcaaattctagaaaaagaattcttgctcaagttcaacaaataaaaaaataggatacccttgctgaaattgagactttttaaaatttgtgtgagcactgatgcctgaagttagacttacatgcagtagtttggagagggggagtcccatctgaggatctgtcaaaaaatatttaaacaacatttgacgatgtttccgaattttctgtaactacacgatgcattcctaaaccatatgcaaatgatttttgagtacccgctgtttaggattttctgaaccacttttctgttagggtgggtaattgaacgttgatcacaaacagctgtgttaagtcttagcctggcaaatgaaaggtatgatacaggagaaatgtaatctggaagactctaaaacccattgagatatgttttaatgctaacaaaatgtagatgagtgtatcagttaggaattctttttgttagaaatgccagatatctcaactccaattgtcattggcattgttggttctggtgcctgaggagtccagggaggtgaaactggcattagggcaaggctgctaagaggggctcataggctgtttatttctatctctcaattcatgtcttctgtgacaactccattttcaggcaggcttacctcatggtcgcaaggtggctgccagaccttcagcctacatccttgtagctgtcagtccagtggaagagaggcccctatcaccggtgtcagtgggtctctctggccctgactggatatcatgtccatggctgaacaagtcactgaaatagggaagtatgatactctgattagccagtcccaagtcatgttatccagccttgggagagataaggagtgctgagttttcagaagcaagtcagggtgctgttacccaaagaagggatgtaggttgctgactgctcaaggaatgacaaatgctgaccacagtatatatgaaatttttgttttttactttataaagtgattgttttataattttgtgtgtgttttttttatgagatgcagtagaattcttcataatactaggaagggggtgagataaataattttcctgtgtttgtgaagtcaacattagaatgtcttttttttttttcttttctggcctgtattagtgtttgaagccatttcgggtagactgtgcctccagcaggacctgtcctcaaatcagtatatctatattttgaactttatgtgttctctatctttaggacacatcaagtttgaccaggtactacgttgtaagacagtgaattaacctgtgtgtttaagtggaattttagtgaggtggctttgaataaataatttgttggggctgggcacagtggcttatgcctataatcactgcactttgtgaggctgaggtggtaggatcgcttggggccaggagtttgagatctgcctgggcaacatagtgaggccccatctctattgattaaaaaggaataaaaaatgttagatgagactctgagacttcggtggaatgtcttaagcacagttcttaccagccttggaagaatattaaattcttgcctgttagaaggaagaagtaataaacttaaaatatgctttgtttataagatgattcaaaaagcattgatacttacaaagaaaatcagtctcacttttgttaacaaaggcagccaggaagagatgggagctaggatagtgatcaacctgctaagtttgtacctgatgcaatttctagagcctggggagggaatggcagatgtggatctttgccttcacactggtcttgaggtatagaggctctctctgttctagggcccctggctgatactttaccaagtgtaaggccactggttactggtggtcacctccatgctacctgcactgtttgtaccatgcacgctatatatgtacatgaccttaaccaacgattgtatgtgcactgcaggtgtttgtacatctgcctgtttatttttctttcttctctacttttctttcagtgtctcttcttctttctcaagcacctaaatatatttttttttctttttctggttcttttgtttctgaacaaaaagaaacttttttttttgttctttttgttctggaacaaaaaaaacttttttatgtttctgaacaaaaagaaacttttctttgtgaccaccagagctggacaaaagtatggcttagcccattcactgatgacatttgagttttataggtgataccaactccaacactgtatacttctgtataggctacaaacacacaaatatttgctagcaagttaagccatttaaattgagttctttgaatacaagccctatggaatttctacagaaactcatctcatggtgaattttatggtttgtttttttttttttgtggaaatgagacactttaaaagaatatattcacatcttaaaattttaaattaaactgtgtccagttgtggtggttaacttctgtaatctcagtgatttgggaggctgaggcaggaggcttggttgaggcaaggagtttgagaccagcccaggcctatattaaaattttatttaaaaattagatgaccatggtggcatgtgcttgtagtcccagctactcaggaggctgaggtaggaggattgcttgagcacaagagttagaggttgcagtgagccatgattgcaccactgtattccagcgcaggtgacagagtgagagcctgtctctactaaacaaacacataaatgaattaaaaaaaactgtgttatattatgtttgcttaaaacattatgtatatctacatcactatttacctttattcagtcaatcagaataaagagaatctatgggataagcatttcacgatgcaattctactctgtacattgaaagatctaaaataatgtggcatgttttcttgaagtaataatattagatctcttctgagaattatacgagtaaaacataaatacattacatgtaagaaataaaaatagtatagacaaggctaatgaccacctgggctctcttgaccaccttttgcatcttctctttcatgctctcaaaggaccattcctaccatttggcattttggtgtacatttttccaggtttttcttttttttttcttcatttatatatctaaataaatactcatagaaaatacaatcttatatgtgtattatcattattattattgtagagacaaggtcttgctcttttgcccaggctggtctccaactcctggtctcaagcagtcctcccacctctgtctcacaaagtgttgggataacaggcgtgagccaccgtgcccagtcctacgtgtattattttaataaaagatttcatattctatatttatcctccagcttgctttttttttcatctaatattgttttgcagagttatggtgattcagctagagaaatagaattgatttaatttttacttatttacttacttaattttaactgatgcctaagatgccgtaatatgactgtatgctgtcttatctgtgtattgagacatttagattgcagatttcactgtgctatttatccttgtgcatgaggagactttctaggggtagatatggagacatactcctcttgctctcgagtggctccaacttttatttttagcagcaattgttttgattactggatgctccacacctttccaaacttttttttttttttgagatagggtctcgctctggcttccaggctggagtgcagtggcacaatcacggctcactgcagcctcaaactcctgggtacgggcaatccacctcagcctcctgagtagctgggaacacaggcatgcaccaccactcctggctaatttttttaaatttttattagagaccagttcttgctatgttgcacaggctgttctcgaactcctggcctcaaccaatccttccaccttggcctctgaaagcactgaaattacagatgtgagccactgcacccagccctttctaaatttttgatttaatcaaataactcgtttttttttttggttagcttttcttgttaattttactgagaaatgtcataaataggatagactcacaaatggccttgtatattacttgaataagctctctattcttcgggatattattgatctgtcttcatttagaaaactaaaaagatttggtgttctgattagactattcagtcttagaggagcccttcctgagactaggataaaaggtctcagaccagggaagtgttggggaagatggaatatttatggttggataaacttgaatctcatttcgggtctgtcttttagctggggaattgcctagctgactacatctatttttcatatctatttccttattttcttctgcagtatttcctgaagcgttaggagcccagagcatttaaataaacaaaaaagatttttaaaaggatgtgtgtttcataccacattttaagattaattttcaatgtaatctattcccttaaaatactgtattcttttcgtggcagatcctattttcttgtttgtttccgagcaaatcctagagatgagcaggaacgttaggcttgagttacagataaaaccggggctgtatttagtattccttgcattgcaagactgaattaggaagtggtacttcataacctggcaacgtattagggcaaactgtggttggcagacaactttcaaaggtaccattctgatgcttttgttacatttgccttttaagtttaaatgctagttggaacaagctaacaccactgatttcacagttttttttcaccccagtgcggggtcttttgattgattcaatctctggcagaaggatttgagtaccaattggatttggtggaattagcctttcatctgggcagctcctcctcctcctcctcctgtgggctcacaggccagctcgcctatctgtgatgcctctcccttgtcttgcaagcccagcctttcagctctttgtgtgagccgttatcagtttcagtggatatggtttgttacctctatttgtactataactagaaatttgataaggttatgtgcctgtcacatgatttagatgtcaggtgcagatgaagcaaagcaattttgacaagtcaaacattggttaagaaatgggggaacgaagacgacctgccactagaagaaagcaaaatcccttacagcctcactttctttctcttttaactttaggtcagtactttaacctctttaatttgtcccttcttaagtgaatgtgacgtgctgacttccggcttctatctaaagggcagtgaaatggaggtcggcctttggaaggtagatgctggcatttagggagatttgactttgggtgttctgataaaaacacctggactggaaactttatctttgactgaaactgagattaagggcttaaaagacaaggtttattaatgccagtatctcttcacatatgtgtattacagaaagcctagtgtttttggttggctatgttcctttgtttaggtacaggtaaggacctgaagcactttttttttttttttttaatgtagattcaggaatacatatgcaggtttgttacatgggtatattgtgtgatgctgaggtttggccttctaatgttgctgttgcctgaatagtgagcatagcatctcacaggtagtttttcaacccctgcctccctccctccctcctcccttttgaagtccccagtgtctattgttcccatctttgcgtccaggtgttctcaatgtttagctcctatttataagtgagaacatgtggtatttggttttctgtttctacattaatttgcttaggataatggcctctagctcgatccatgtggctgcaaagggcatgatcttattattttttatggctgcatagtattccatggtgtatatgtagcaccttttctttcttcagttcaccattgatgaacacctgggttgattccatgtctttgcaattgtgactactgctgtgataaatgtacaagtgcagttgtctttttggtggaacaatttatgttcttttgggtatgtacctagtatgggattgttgggtcgaatggtaattctatttttcagttctttgagaaatctccaaactttttttttttttttttaatatagagtctcagtcgcccaggctggagtgcagtggtgtgatctcggctcactgccaacttctgcctcctgggtgcaaacgattctcctgcctcagcctcccaagtagctgggattacaggtgcccgccaccatgctcagctaatttttttttttgtatttttagtagagatggggtttcaccatgttggctaggctggtcttgaactcctgacctcaagtgatttgcctcccttggcctcccaaagtgctgggattacaggtgtgagccaccatacccagctgaaatctccaaacttggaagcatatttttgtcatagatttttcacaatacaggcagtgatttgatgagtattgctcattggcttgtcatattgtccactggatggggtcagtagggcctctgattaattaggtttaagtttctcagagccccttctttttgtttttcttgactgattaaataacacctctatctaaatctctttacagcccacatatatatctatatggacacatagatttcctttggcagctacctcagcagaaaattcctcattttgctagtgctaggttgggcagtagttacctcgtgaatggttaacatgtccaagagatgctggagttggaggcaggcttccagtcttttgccaccttgttttgtaaagttatgtaatgactgtaggtattcaagtgtaactcatcttgacgtgggtttcgttatactctgaaagaacaattcaaagaaataacaaatttacattcagggtagttttgtttgagtttatttaaagaaatgaaacatacacaatccctataatagctcttgctactgatgtattgatggtgctgacaaagagaaaactcggaccagatggtttccacatagtggaaccacctggctcattggcaatgccaacttattgctgtttctcaaatagctgtactctcatgaactatgaaatgtaggagtgagccattcatgggcccaagcagaatgacattccaaaattaggattcttaagagaagtcgaaacacttatccatgtcaacctcaaactggcccctctttcccacttctagtacttttaagatcttatttttaactctttctctttgtaattataaagtccagttctttatatctacattacaaagaaaacaatatgataggctcttgaggtatttattgtagaggaaaaagaatggtcctatgtcattttgggaaactgacctagaactggacttgcttggagcccgttagtgtgttcaggctgaggggaccatttggagtcagcaaaggacaaatataattgtacctgtaacaccatggaattatatcgaatcatgaaacttgaaacttcatagaaatacaatcaagataatagatgaactgaagcacaaactcatgcaatagtttttctaattataatgttaacaaagtttgggattttcttgaattatttagtatccatttttttcctgttgaaaattcacgttaatttttaaaagtcagactagcaaattaacctacacacttttctaagttggtgctttaagactgcagttattttacaggtcattttaagtagttatcttagttatttactcatttgatggacacctactgagcatctaattggtagtatgtgtaaccattaaaggttaattggctaatgtatgtaacatgtaagaacaatttaaaaattatttcagatcttgtttacattgtttagaatctagtcttttgaaaaataatgatatatttttatttaaattacatttcaaggctgggtgcagtggctcatgcttatagttccggcactttgtgaggttgaggtggacagattacttgcccacctcaggagttcgagaagcagcatggcaaaaccccatctttacgcaaaatacaaaaattagctggatgtggtggagcatgcctgtagtcccaagtacttgaaaggctgagatgggaggatcgcttgagcccaagacgttgaggctgcagtgagccaagactgcaccactgcattccagtctgggcaacagagtgagaccctgtctaaaagaaaaaaaaaaaaaaagaaaaaaaactaagcgatggtctttgaagtttacgaagtatttgaattgccattttgtagcatgataggatgggaagagcaaagactttggggacagcagatctgggtttgaatcctgactctactattcacagatggcaatgctggtcctgggttgtaaccactaaaccactaagcctcagtttctcatattagttagaattcttggtcacaagtgataaaagtacccaatgctcattaacttgaacaaaatgagaattttgaggatactggggtataaaatccaagggcagaagtgtgcctgcttggtcttcaggaacagtgggaggtcaggattcaaatgccatcagaccaggactctttttggcagatgaactgcatctgttcctccacatctgtgatggcaaacatggctgttgatagttctaaagtttgatgtcttagagttttattcactagagagaaagattcactccagactttgggttctagttcctaaatcaaacctcttgacttggactggcttaggccaaatgaggccaatccatggtggttaaagaaggaggttaaattaaaaaatggcacctcttgacaaagtctacgtgaagagaaagaggctcaggaccattactagaaggagggaggatttgggtagatcaaattataggtttctgatacattttttctatgtaaaaaaatggtagtctgggagcgatggcttatgtctacaatcctagcatattgggagacagatgcaggaggatcacttgaggcccggaatttgagaccagcctgggaaatatagtgtgaccctgtctctacaaaattgaagaaaaaattagctggacatggttgctcatgcccaaagtcctagctatgccgggggctgaggtgggaggattgcttgagcttaggagattggaggctgcactgagccatgatcatgccactgcactccatcctgggtgacaaagcaatactctgtctcttaaaaaaaaaaaaaaagaaaaaggtaaaatatcttttttacaaagtgattttgaagattaatcaggatagtctgttaagtgcctagaacaatgtctgacaccttataggtcttcaataaatcatacctgctgttacatagcagggagacaacattccagcatttcttacaactgacactgtaattaatgtggagctcttacggttagctaagaagccataattcttcatgtaactcttcaacacttctaatatatttatttttaatagtttctttcttatggaagacgtgaattagtgctctatttctagttgtaacatagattttttaaataacctgtaaaaaattctaggagatttatattttaaatgaaattcagcagtaaggaaataatcttttacatgctttgattaaaatgactttttgagatccatgctgtctgtcatccctttgtgtcatttgtatacacactaagtataatgcatttacattttttttttaatttttattttattttttgagatggagtgttgctctgtcaccaggctggagtgcagtggcgtgatcttggctcactgcagcctctgcctcccgggttcaagcaattctcctgcctcagcctcccgagtagctgagactacaggtgcgcactgccatgcccagctaatttttttttgtatttttagtagagacagggtttcaccatgttggccaggatggtcttgatctcctgacctcatgatccgcccaccttggccttccaaagtgctgggattacaggcatgagccactgcacctggcctatattgatttttaaatttgtatttctttttctcttttgctgtttacagagtttttttcttcttttttcagttttgtagagtggaagaattatgtcttgttatagaaaaacagttggtgtttgcctgatcaataatgccattgcaggtatgagagggaggttaggaacaattttaatgacattatcaatctacatatctagaaacattgaggaataatctgtcacttttatcagctgtgacgagactttgagatttaggacaggttattttcactttcatgactgttttgtgttagttcactttgtttatatttgcttgattctgggtttatcctgtttctttaagctagttaggatgtagcttttcttttctgaatgactcatttcctaattagttattttctaactggaaattacttatttcgtaatactttataattcagaatatgtacacaggactattccctgttgtgatttcttattctctccttattttaaccttgtgtggtaccttctggttcaaagtaatttcaataatattctattctatggctgggcgtggtggctcacgcctgtaatcccagcactttgggaggccgaggcaggcggatcacgaggtcaggagatcgagaccatcctggctaatgcagtgaaaccttgtctctactgaaaatacaaaaaattagctgggtgtggtggtgggcgcctatagtcccagctactagggaggctgaggcaggagaatggcgtgaagccgggaggcagagcttgcattgagccgagattgcgccactgcacaccagcctgggtgacagagtgagactccatctcaaaaaaaaaaaaaaaaaaattctagggttgggggaggggggagggatagcattgggagatatacctaatgctagatgacgagttagtgggtgcagcgcaccagcatggcacatgtatacatatgtaactaacctgcacaatgtgcacatgtaccctaaaacttaaagtataataaaaaaaaaaagaaaaaaaaattctattctgtgtgtgaattaagctatttatatttaaaaattataatcatataaagatgagactaaaggattaagagaacatgtgttcagaagcaaaatttatcaattgtccaaattattaaatgctattagtgaaattcttagtgaaaatatggattatgtgtacatattttaggcttcaattttccttattaatatagatataatattttgccttgaattagtatttttgccagtgctaccattttggcaatggtatttccctgctaatctgatctttcctaaaagaaaacttaaaccatttttgacttcaacagaaagacctgaaaacacttttattgaaatgtaggttgtgttaaactttaccttgggaggttatttgtctcttttgtggcactacaggatccgttacagataataaattaactaattttaggttatgcaaatcttttggcatcctatactaagaaatattcaattggttccactttcacttctgcttatttacagaatgttgtttatgtcttacttgtgttcactttgatatttttcgctttggcatttttttccttgtcagataaattgaaagataacatctggggagatgctgggcaggtggatgtcagagagacttccgccttccatcagctccatgacttctgcaaacttccttcatctgtgaaatggaccttaacgtgcatacctgctaagatttatctgaagatgatatatgtaccttgtaattattgttgcctttatttatttatattctattaattttttttttttaagatgaggtctcgctctgttttccaggctggagtgcagtggcatgatcacagctcactgcagccttcacctcacaggctcaagcaatcctcacacctcagaggcctcctgagtagctgggaccacaggcatgtgccaccatgtccagctaatttttttttttggtggggggagcagagacaaggtctcactgtgttgcccaggctggtcttgaactcctgggctcaagtgatcctcttgccttggcctcccaaagtgctgggattacagatgtgagccactgtgcccagcctatttgtattctttttttgatccaaaaaggactgaaggagctcctaaatgcagattgcacagtccctggccatggggcaggatgttgagttatgatgagtgagtgagtcaacatgtgtgtacagtaaggagtgctgagcacatcttacagcttatccgctgggcttcccatcctcgctctgctcacacaataatgtaaaacactcattactatgcttggaacacaggagccacttactagatgtcaggcagtagtattatctcatttaattctcacaaaagtgctctcaatattgtactaaaattacgcatattttgtatatgaggaaactgaatctcagagatactaagtaacttgcctaaggtcacacagctaatatggtggagtcagggcccaagacaagtttgtgtaatttctgaggctatatttttaaacactaagctacacttgagtgtcttaggggtaatttttaattatcttaactgattgagaaattgaaaggtgctttttggggccaggcacggtggctcacacctggaatctcagcactttgggaagccaaggaggacagatcacttgaggtcaggagtttgagaccagcctggcaacatggcaaaaccctgtctctactaaaaattcaaaaattagctcagtgtggtggtgtacgcctgtaatcccagctactgaggaggctgaggcacaagaattgcttgaatctgggaggcagtggttgcagtgaatcaagattgtgccactgcactccaacctgggtgacagagagagactctgtctcaaaaaaaaaaaaaaaaaaagaaaagaaaaaaagtcatttttaatgtatttagcatttttgtttagaataaaaaaaatttcatttttttttttttaagtaaaagaaccccaaatctggtaaagttggattgtgaatatacatggaaaactgacaaaacagtaaatatcactaagagcctctgggaatgcagtggaagtttaattgaaagcttagaaatctatggacatgatttttaatgctttttaattatgtttaaaaaggtaattataattttaattttatttaattaaccatagatttacaaattatgagattaatttataaaaaagcaaatttacttttgagctcattcctttgacttaacatttgctaaaattaacttcaccttaaaaaaaactcttaatcagattttcctttcgactgtttaattcccgtctaacattgtgagattaatcaattttctgcattttagaccttaaacgtacaaaactagatagtaatcaatcatgaaatggttattaagcttttaatctatgcttagcacctgcttagcaccaaacaaagtgcagtgagagagaaagaagcatgtggtctacattttctagtaccttaaaatctgtggaaagatataagatgatgatgaactatacaagaactatacataattgagcactaaattttgcagatcaaattaagaattttgcatgtagttttaaaatattgcgaccctcaccatctccctttaaagaaatgtggagtatctatcatgtcgtgaaaggtaatgaaattagtcatggatttcattgtatcagaaatgtatgaaataaagaacagaataatgcgaatcagtaatacatgtgcctgagattttaggcttctgttaaacatattctgacaagctgcattaaagcaaatactgttctcctcctatatataccttccgtccttgcatagttctcactgcacttgtctatcgtgatacatgcgacgcatccccttgaacttctatgattcctccctcctccatatttatgtatgtatttaattattttagagatggggtcttgctctgttgcccaggctggagtgcaatggtgtgaacatagctcactgcagccttgaacttctgggctgaggtattcctcctgtctcagcttccctagtagctgggactatgggtatgtaccaccatgcctggctgattttaatttttttttttttttaagagatggggccttgctatgttgcctaggctagtctcaaactccacgcctcaagcaatcttcctgcctcagcctcccaaagtcctgcaattgcaggcaggagccacggtgcctggccctaatccatatttggaatccctttaacaccacccttttacactctctcaatgcaatttttcctaccttcttgcttcaagtctgtgtttgctggtgtaaacagcctcactaagatgaagaaactcagagtggccgatttaactttctgcagatggtggatacccattgactagctcacctgccatttacgaaaaaacccaagtctttggctgactgaaaatatcaactgaattactggttataatactcattttctcttctcccactcatgttttttgtctaatctctgggttcctcagtttctgcatcaggacttttaaaactgcgtccctgctttctttgaaaatattcttatcgtgagatagttgatcaacacaaaagattatatataatgtgtacatgcaagttttgtagggtgatagtaaaaagataacgtgtgaattcgccatcaaatgtaagaactagaacatcaccagtaacagggaagctccctgtacattttttcaccagcaggtcttgtcaccactcccctgaaagttgttatcaagccccctcccaccatacattcaccagtatgcacttgtttttttttttttgagatggagtctcgctctgtcacccaggctggagtgcagcagtgtgatatcagctcactgcaacctccgcctcccaggttcaagtgattctcctgcctcagcctcccgagtagctgggactacaggggtgtaccatcacacccggctaatttttgtattttgagtacagctagggtttggccatgttggccaggctggtctcaaactcctgacctcaagtgatccacctgccccggcctcccaaagtgctgggatcacaggcgtgagccaccatgcccagccctgtgtctacatttcttgctttttcctcccctcagcgtaatgtttctgagactcatccacatagatccatgattcacttattttaactcttaaataatattacattggatttattcattctcatgtggatggatatttaggttgtttcctatttttttttttctttgaaaatagaaacaacgttattaagaacatgttggtccaggtctccagatgctctctctttggagagaagcatgatctggtgtagagctggtgagctgtaggatgtgcccatccttgaattcattgccaagtgttatttaatctccttttaacgtgaactctcctttaacgtgaatctcctttaacgtgaatggtatggtcataaacataccatttatgacctacataatctccaattagtgttatttaattgtcattcaacaatttaccagtctctggtcccagttggcttccttcttccttcatccgcgatggctttctgcctaacagtggcctttctctttagtggattccattgtctccatttactgatgttttataatagtaataattgcgctgtttgcagcatttggggaagagaacttttatctcagcattagtaaataattccatttgccactctgcctgttattttgtttttcagaagtcttcctttttagtcactgtgagccttttccttaagctggtccagaactgctccggtgtccaggctgtcaccctgcatgaacttgggagagctaattgctgatgacttcaaacacaaactgtcactaagggtgcacactttggcagaaatgcacatacttcagcagcaaaggccgtttttaaaatttagtgaaaagaatgaaactaatatttgctgaagggtcatatccttgcttggtattttcacatgttatttattttcaccttgcaaacattcatttaatgtgtagcatattgcatattttcttgttttattttctgaggatcaggagtgttagataaatagaacaaattaagatcacagaaaagaatcggtttaaattcaggtttcttgattcttgctttagcgttctaatctatgttgcaggaagttatatatgtacacatgcatatcatgtttctgtgcatacatgcaacatatacacacagacacgtagaatgtcaacacatatgacatatatagaatttccataatatatagtattcaatatttgacataagacattttgaagttacttctgaaggcaaatatggcaaagcaagttgcctattacatgaatttctcacatttgactttgaatgcgttttcaaagtgcctttcttcagtcttgaagggataagactgtagggagataagactgtgttacttcccaggtatggcacattctctttctgagctcaggttggtaacttaattctgtcctctctcctctttgtccttcctgctccgttctgacaacagtgtgtaacatgcctggtggggtctttcggggacgccagggccctgaggctgggcccaagaacttttgctttcttctgtggtcctgggacagttctctgacagtggctgactgggggaggtggctggatattgcctgactctacctgggcttctcgcgtctgtcctgcacacttccaaggagtttgcaggatagcagccagagaaagccttttaaaacacaagtcagggcataccgctgttccgcatacaaacctccacgggccccatgacccacagggaagaaaagccaacatcctcagggcgtgcaaagccccgtgtgaccactctctgcagtcctcttcctcttccctcccactaaggttgctccagacagagcggccttccttgacctttctaaagggttttagggctttgctctgtctgttccctctgcctgcatagctctcctggaagaagtctgtgtggctttcttcctccctctttgaggccttactgaaatgtcaccttcttactggggacttccctgaccaccctgtctagaagggcagactgcctgacacttcacgtccccttgtctcgctatttttctctcttagcgcttcccactaacataccatttatgacctacatagatcttgtgtgtttttcatctcttgcattgtaattaacataagccccatgaaggcagggaccattgacttctctttgtcacatcatttctatacctggaacagctcttggcccatagtaggtgctcagtaaagatttgctgaatgagcaaaggattgtccatgaaagcaatgctctttccttgatagaatctgctgttgatctaaactattacatcttgtaacatacataggaagaatcagggcatagaagtcaatgagaaatttacatgtttgtatttactgggagccttgtcatacgtgtgtacaacacatggacacgggggctggttatgttcatcagaattcttttgattgtaaaaggaagagattagctcacgtaacgggcaaacctggtatttctggcttttggaagagttaaattcaggtgctcagatggtgatgtcaggactctctctcaatcactcttttgcttgcctctgtgttgacttcattattggacagtggccacatggtagtcagcaactccacttttacagccagttaaactagccagaccatagcaaaagagcacccctgatatggtttggatgtttgtccccctcaaatctcatgttgaaatgtgatcctgagcattgaaggtatgcactaatgggaggtgtttggatcatgggggcggatccctcatgaatggctttttgccctccccacaacaatgagttcacgtgagagctggtttaaagagcctggcacattcccctgcccttgctccctgtcttgccatgtgacacgctggctccccttcaccttccatcatgattggaagcttcttgaggctctgaccagaagcagatgctggcaccatgcttcctgtacagcttacagaaccataagccaaataaacctcttttctttgtaaattacccagtgtcaggtattcctttatagcagcacaaataaatgacacaacccctttcccaagaattcctgccagagtcccagagctgaggcttctggatgcttgctagattatgtggccctcccgagatctatcacagggtcttgtggatgtggtgtcctttttggctggatgaggtcatgtgagggcaaaggggccacatgagattggagagagacatcctgctatttccctctgtcctctgttctctttttatatccacttgcctcctagaatcagactacacatgactgacaaaccatctgataccacatttaaaattagacctaagtaaataggatgaaagtgggtgggagtgtggaaaagagagagctgatgaatggctcggagtttccctatgtgtagtaaagaaatactggtgggctggtgcttgaactggtgctgagagggtaagaggcttggctgtgtttcacaccattcaaaagaaataggaatcctgcaacactctgcaagccatttttagaggtgattgtacacttctcaaagttagtcacacaaccagcaagccaaagtcagatgattcttttgtgtcttgtgaatgtggaaaggattgttgaacagtagtcagctcaaaacctgtgattctaggctgggtgtggtggtggctgatacctgcaatcccagcactttgggaggctaaggtaggaggatcacttgaggccaggagttcaagaccatcctaggtaacatagtgagaacccatcactaccaaaacaaaaagaaaaaaccaaaaatacctatgattctagaatttattggtttttcttttcacctctgtctttggaaattgctattaaaaaatacagacgagtaacaaaaataatatgtgattgtgccttctctgagactggtgttaggaatgctagaacttgtctcacaggcatttcttcctatgtcttcatgcctgttgctattccaaccttgtcatccttttaacttttattattttactactctgagctccagtgcttactaccagcaaaactaaatagcttgcctgcttagttaggcattaaacgctgagaatgtgccagcatgtggatctttacccatgctgggagatggagggtgagaaggctaatctctcagcattttatgtggaagaaaaatattgcagtttatttgaccttttacttatgggaataaagtaaggggtttagtgcttttacaaatcgaaagtacagagagaagaattaggtattcttaagctaaaagcgatgagagtatctagatttccgtgtgtgtgtgtgtgtgtgtgtgtgtgtgtgtgtgtgtgtgtgtttttctttcaagcttgtctggtaaaagaaaatcttgtcgtatccttgaggataataatgcttgatagaattgggtatttaaatacagacatgattcaacagaaacagccattccatgttcaacgaagtgaacttttctaccttctgcagaagactacactacactaacaatcatattgaataggcaaccctaaattaacttaattaattttaatgatcaatgtaagtgttgattggaagcttgtaattttgaatgtaaaatggggattctatggattatcaaaatatgtttccaaatttcttgatatttaggcttaaaaaaagaacaaagtgatgtaaccatctcagtcattaacaagccaaatctttaactggtgtgacagttattgtcattatgctaataacaggagatggggttctgtaagatgaagcattagctgttccagtcctccgaggaaacagtaaaattcagctccattgggttgtaattagaaaagaagtatatttaaatactgaaaaaaatcttcgctacttcagcacacagtatgccaagggcatgtgtgagcagctttttaatctctaggtgtggcctattttataaatattttcataagcatttatgtacttgccatttggcaatacagcattgtgtaattgtatccatatgttggccttctgaagttgaataaaaacttcttggacagggctagctgtcaattcttcatctccctcctccatagggcagtttaggctcaaaatgaggctttttcactgacaggcgggcacaggaggagaagaagatttagctttctttttctacattttctttcctttcacagtagtaatggtattaatggtgataatcataataactattatggagtacttacttgtttctgtcagccagattcatgcatcaagtagtctgatcccatccctacaacctcttaaatagccattgttgtttgttattgccgctgtacagatgacaccactgagcacagagtggttaaagaacttgcttaaagtcacacaaatggtaagtggagtttctgtgacacaaaccaggtagcctggctgtttccttctggttcttaactgcacctccggctgagatctgtgtttttagccattgtttccaattccagcagcttcgttggcccagcctatcccgagtgggattcgtgatccctctgttcacttttcttttcccccttcttgttaggtcaagtacaaaagagattttgaagaaagcaaagggaggggcttcagcatcgtcacggacactcctgagctacagagactgaagaggactcaggagcaaatcagtaatgtaggtgcctgtttattcaatagcatgatggctctgatgtgcatttctggatgagaaagggaggctggatgacttggaagtgtttgtgttgctgtggggtgcaagcagtactcagtgcacgcatagactatgccaatttcatctggtaaaccctgccctctggttccatcacagttatctaggacccggtgcttagttacctaatagaagatctccttattccattttgaatggttctcagctttcaaatttttccaaaataggccttttataattaaaataagaaacttgaaagttaagttttgactgtggataagcatataaaatatacatataaggttaggagtcttaagatctcctatttgccgactaggtgtctataagatttcatattttgaattagatatttgttgaaatcaggtattacatcttacttttgaaataaacatttatatatgtagttgctttggacttgaagctgtgccttgtttattaatatagtttcctcaaaagagaaaatggagactaggagaagttcaaaatgtattagggaggtattaattcagtacttattaaaggtggataaacagctcttctaagttttggtaattcacacctgtgattatgtttcttccaaaatattacatgaagtgtgtcaggatgtatttttcttcacaaaaattaattcaatgttagatatccaagaagaaatatggatgaaaattaacagatgtgtgagtgacataaaagtatgagcaaacaggcaacactcataccatttttcacgagaactgtattttgtgcgtcacttataaagtcactaaaatttgtatatctaggtgttataactgatgtagccttaatttccaggacatgtttaattagcaggtggttttaaactcactgatatttggtcatcatcatgagatgtatgtatacatgtatatatgtgtgtgtgtgtataaaatacatgtgtatatattatatatgcatttatatataaatatgtgtatatatacacacatatacacacatataaaatttgcagatagaattatgtataatttgagaaaaatactttttatatgtctaaagttcaaaaacagaattatttcatgttaaacaatttattaggaagtgggaggatgcaaagtacacattgttttttgctctttaaatggacattttatattagtagggatttcctttgaagaaaaagagttgaattttaagacttcatgacatttgtctcttagtttttctaccccatcccagcaatccatcagtcatgaatactgaagatcactgccttatttttcttcctctttattctttccttaaaccaaaaacctatttttgcttttaagaatgcaaatcaatgatctattacactggcagttacatttaataacagttctttctttggattatttttggcaaatgtttatctaaaaaataattctgccaaaaacagttatattatacatcttcaacaatcactgaattttatttcaaaaagaactaaacatttctacctaagacatccatgtgacagctaacataaggattgaagctgatcaaaggtaagccttttaatttttattcaaatttagtcaatattcatgtttaattaaaaaatactgatcattttaccaacctttatcattagcaggaatatacattttattcaataccagaggtggtttgcagatccattcttaattatgcaaaatacccttatcacacaggtatgtattaatctatatttatcatatataatatgttatatagacagcagtataaaaagcaccatttagattaagcctattatttagacaactctgatttttaaaagcatgtaacttagacaacatctttttttaaaaaaaaaactttttgcgatgtcttaatgttagcagccgtagcagtcttataagtagttctcttagccaatatgaggcatattaaatgtttggatagctgtaaaaaatatagacttcataatattaccattagggaacaactcttaaagaagggaggctgttaagtgctctgaggtctggtgaatttattattcatttataagactgcaacttcatgaactttttcccttacctcactaggttttccatattactcaaggatctttttctataagaaacttgggttgatccaaaaagtagtactttggcaagtccagttttccatattactttaatctaaacccactgaacagtattggctaaaacccaaacagatattttttgacagtggctggattgtgtctgttatgagaggaaacaggtgagaaagtgtctagactggaaagaccccagaatcttccggctagagatgctgggaaattataatcctgaaaattatagatcctgaaaattattaggggtatgaaatttgtgagtcttgcatttgagtgccaagtttaatataggttaatataggtaggttaactaagatcggcagtctttgctgtctttatgtttccctgtgtttcattttctcctatttgtttctagtttatctctgaatattgtgtggctctttcttagctgcctttaatctctcttgtataaagacataaagcagtgaatttaatgacaactcctaagtgttttgggtaatatgttacggatgaatgggaatttttgattgcttatgtctatgtcaatgttttgaaattttttcagctcttctcatgtttgtttattgaggatttgaaatcatttggaaatgaccactcagtctgcatgttactgaggtgtgggataaaatacaaccgtaaatttcaaattgagtgtgatgaacgaggtgagagtgggtgaacttgccttttctgggtagctgtaatgacaacatattgaacatgggagatttgttaaatactgcaatttataattcttctgctatgttacccacttagtgtagccacagaacaaaacaagaaaagaggcagtatttcagaattgactaaatggctgggaagaaaaagaacttggcttctaaaataaagcaaaattatttttttccccatgaaattccagaagatgtcttcatctcattgaatatattaatattcagatggggtttggttgcttatgaaattgaatgttaggcttgggaacagtttttataggaagtcaggaaatcgagccaaatcgtttaattgaagataatgttcagaagtccaggttttgttgaaactgtatctcttcagtagaatgaaacctgacagccaatgtgttcagcactgacttaggaactgtgggccagaaagccctgccttacggattttcacaactgtgtcgcttaattgccatccaccctctccttgcccccaaactctagggcataaattcagaaatggcagaaatatctttgtacatcacattttctttatttaccaatattttaggaaaatattcttaagggacagtgtccaaatatgaattgaggaatactgtgcccaagggcattaaaaaaaatgaaacacccttttctgtggctgctactgggctagctcatgtgggtaactgtaaaggctctttctaatttcaggtggttcccaccttcaagtttacaagcaatgcattcagggtacctgcagcaggatctcaaagcacaaccatcgccagacattcaagggactcaggctagccttgggaaaattactgatgtttcattctggctgtttacccactaatatcagctgcactttcaattagctgagacagtctggggataaattgtgaaataaaatggtgaagtcaaaccccaagagacttttacagactttgtgccatagatgaaaactggatgtttattttctaatttatttcagggggaagagaaatatcaaatgaaggggaaagaaacaaaaatcgaccagatgacaaaattgtgtgttttaaagactgactgaaatggtgagtgtaccattatttgatttgtcaggatttctgcgtgttcttgacaaatggagaaaatagttttgcttgtctgtgtgtgcgtatatctgtgtatgtacctctgtgtgttgacttcaatgagagtgtctaaaaccccattttcctagatcagtatagactaatgtctatagacattagtgtttcacctgccctatattatttcccttaccttgtcaatgttcacaattttaattatctgtccgctttcccaaatatccttttttgctaccactttcaatttcgcatacccatttataagaattgcttgcctactttacaagaaaagctaagagtgacacttttaaaaaagtataccaaaaagtaatctctctataatttgatcttgtaatataattatttttagctcttttgctacactacataatttttcactgacttcttagaatgtaaaataaattatatgcccattaataagctcacacggatactgctgatttagttccctgagattttgtgagttagcttcaacaatattagattattgggactaaacattgcctaataattgaatagtagtgtctatgggctattaaaagatttgattcaaagttcggttgagtgcaagggtgaacatgagggtagggacaattatctagggatttggtctctgtttgtaatttaaataaatcattttgacagagactgactgtaaccatgttcaggctgctgacagtgtgaaattgagttgtatggtggacagaagacaagcagtcaagagaaatccccaaaggcgaaatttgttatgtaattgggtcaactcatgcatgagcaatacatgctaattgtaaactggtggcaaaattatcgtgtatgaggcaattaggtcttacatgaatctgaacaacagacactgaaggagatttttttctttttatatttagcaaacttttttttttaaatatgagaaaggtaaaaattataaagtcattcattgaaatacattatttgttaattttgttctttatacaaaaagcagaagttttataactaatgaaacatttatgtaaaagcttctgattttgagtagtaaaatctagtacactaagcagtttgaagggagaatgaatgttatttttattgtaagtcataagtgggttgattaacatagacgattagttatgaggtcagtggtttagatttaagctcttgaaggctagtatttttacagagtgaatctatatgttgctttagtggactagaccttatctgtagctcatctcaaccaataactgatgaattcccagtaaatagtggggtcagtagcattatctttaaagacaaagtttaaaaaaaagagaaagtgatagggcaataacacatattttctcataatacctaacagatgtatgaatacctcatttattttgaaacactttgacataccctgtttaattagatcctctgaacaaccgctcctcgggaaaagtatttctataaggattacttatactttcatgtgagaaatgtacggaaaattacctcttggtcctttcttgtttccaaatctgtggtttcccttacacctggttttgctttatttttccatgtagagcagaacttcaaaggctgatctcttctttttagcctcaatttttcagccacagtcacttaaagaaacaaatacatcccagaccagtaattacttgtgcatgtcaagtacaagagttttggttgtaaaatggcattgtctaaaggggaggtttgagaagagccccggtaataaaagaattaacacatatgacttttttttttttttgaaacaagagatgagggattcagtgaacaatctgtgaagatccttttttcatgaaatccttttttcccatattcctttcttttcagtttcactgtgttcaggccattatcttgcctgagttactgcagtaacttcctaattggccttatctccttctgttcctttcattgcatctaaaacacaatgaccagatgaggtgttctaaaatatctctttcatcaagaccctaattatgacccactaaaatactttccatggccctccagtttgagtaggataaagtctaatctcctaaaccctttaattctgactctaaggaccctccacaatctgctcctaaatgactatttttcaccttatctttcactacttttcacctctgttcttcgatttcttttaggcctgcctacttactctgttctgggcttttgcatgagtcattctgcatgtttaggacaatttcacactatctgtaaatgacagcccagccccctgatcccagacacacactcaaacccagctacagtgatgtgtctcatctctgaattattgtgggactttgtgctataacactatcatttgtaccactcatttcacacatcatattctccactttggttttaattagcattttatgtgtctatatgtctgacctccttaacttcccataggtgaagatcatccatgtctctttccatttatgttttatatctgaaagaatgcaccagatggtgctttatactttgcatttctcgtcacctctctaatttagggccctccctaccccttgataggagtgtgggaatagtctcttgacttgggctattctccttacagtttcttgcaaggttttcctaaaatgcacatctgatcatgtcacatcctcttttaaaatctgttaagtctctctgctgcctttaggataaaatgtaaaatcttttgcctggaatgtgaggctgtccctggcttagtgctagctgagacctctagcctgggaggccctcttgcaatctgaacccatccatttcacacttctgcctgcaagtcccttcatacctctccccatccacactggctcagaggctaccattgagacagccagatgggagggggtccccggaaaaactccaaccagcctgcccactagggtagagccttgggaagtttgtgctgtttgcagagggggcggggtggtggtgggggagccaggccccctcctcttcctgtgtgaaacctggaattcgaactatgaggcaggaagctctctagcaggggactctggccttgcagggagtccctgtttcccccttttcttcctttcacccagcaaaaccctgtcttactcattcaaattgtctgcgagcctgaattttcattgccgtgggacaaaggaccccatctttagctgaactaaggaaaagtcctgcaacaccatctttccctagctgctctgacagtcagcttctatagctgcattatgagttttcctaccctcagactgaactctatgaagaaatgggctgtgtctttttttctatacagacccagggcctagcccactgccatatttaataaacaaatgtatcgaccatttgtgtcaacaaatatttttattttttactttgatgagtgaatctcctggccttgtgtgaatttcatcttacagtgaagattattactaggagttctaatctctttcaaggtctacatatccattgcacatcaattttcttcttgaaagctcccagattttttttctattgtgtcattgtctagcacaaagtagttatcaaataaatatctattcagtaaatagctggattattttatgggattactttctctatatccagggtgttttttctttcttttttttttttttttttccttaagaagagtttgccatcccatccacttttcagtctaggcaagtaaaatcttttctggaatatctgccatagtggagcaaggaatgagtctaccccttcaatgcaagatcggttatgcctagaatagagctcagtacagagcacgtactcaataaatgcatgtggaataaacgaatgaggtaataatatgtaaaatattgactaattttgtacattctttttcttgaaactcctctttgcaaggatatttttagtttctcaagttgctttcaattttatgattcttttctttttggtgctgcttgataaacacgatcttttactctctgctccttaaatattcagtgacttctatagttttatcaaaggattgtagcaacatttcctcagtaaagcaggataatttattttctaattacattacaaatgccaggacttcccctatcttaatatatcatagggaattctttttggtgtctaatccaagagcctacaaaaaaaaaaaaaaaaaaaaaattagggcttgtcttagtctgctcaggcaccataacaagatattgcaggttgggcagcgtaaagcgacagaaatttttctcacagttctggaggctgggaagtgccagatcaaggtatggtagggctggtgagggctctcttcctggcttgcagacacttgccttcttgcagtgtcctcatgtggcctttcgttggtgtgtgcatgtggagagagagagggagagcaagagagatctctgtgtctcctcctcttagaaggacacagacccaattggatcagggcttccttgtgacttcatttaaccttaattacctccttaaagtcaccctctccaaatacagtcacattggtggttagggcttcaacatatgaattttggggtggtacacagttcagtccataccagggctgaatggggaatgatctgcatgtataacagggaaattttgaggtatttaagtgacatacactttgtgaatgtgctttgaaatatccaaagtgtcacataattataatataagctgctatcatgagctaatttcttgttttttcttttcttttcttttcttttttctttttctttttttttttttttttttttgagacagggtctcactctgtcacccaggctggagtacagcggtgcaatctcggcttactgcaacctccacctccggggttcaagtaattctcgtgcctcagtgtcctgagtagctgggattacaggcatgtaccaccatgcccagctaatttttgtatttttagtagaaatggggtttcgccatattgaccaggctggcctcaaattcctgtcctcaagtgatccgcccacctcgtcttcccaaagtgttgggattacaggcgtgagccactgtaccctgacagatgagctagtttctttagtgaagctagataatactaccctctacctgttgcctttccaggaaaacttctacattcagttttaaacttttccctattttcaagctgaatattcttaactaaaaaaagaaaaaaaacttcctcctatatcctatttccagttctttttttttttttttttttccttcagacagagtctcacgctgttgcccaggctggagtgcagtggtacaatttcggctcatggcaacctctgcctcctgggttcaagtgattctcctgcctcagcctccctagtagctgggactacaggtgcctggcaccacgcccagctaatttttatatttttagtagagacggggttttaccgtgttggccaggctggtctcaaactcctgacttcaggtgatccacctccctcggtttcccaaagtcctgggattataggtgtgagccaccccgcctggccccggttcttaattgaacctttaaaacttttcatttccaggtttgagccattagtcattgatagaaacacagatactttagagtgtagtgaagtttttaagttttccagatcttggttgaattatgtagttcagaatgtggacttcacatgtcccgtgctagcagtttagcctgggcagatgtgaataaaaaggagggcagagaggtgagaatagaaaaaaaatttccaggacacagggaaagtctaacaaagactagcttcacgtctcaatttccagtgcatgatgcagatttagaactttgaaagtatctaaattttcttccagattttattataccttttgggacatagccacagtgagtagaatatcctgaatgttaaagaaaaaccagaactcttatgtatatatttttggagtcccagatgtgactatcattaataattaggccatataattataatgtcaatgaagttttagaggcaggtttaaaacctgttgttttcttagttcttaagagtaatagttgagtgttattttagcttattggagggtcataagtcaagggagacattgtatagagatttaattcaaaatccattggtaatctaagccaagtttatacaattagagaaaattttatgatttggaagttagaaacaagaatgtctttttttttttaagtatgcaactatgctctctaatttactttgcattttcctggaaggattatgtcataaaaattgcatttctttctttttttttttttgctcatattttcttctatagctttctttccattcatggttgtcaggcctgctttgtggcctttttctcttttgtacagaatcacatgcaatgctgcttgcacaaagatatctaaatttctgtctgaaggacctattgcttttgtgaaatgcctccagactctatttggttccaaggacaagaagtaggaagtcatgttttttgcttctttatatttttgatttttccttttgtggctatatcaattgtaacaaagtcagcttctttttttgtttttttcgaatagagataaggtttgcctatattgcccaggttggtcttgaactcctcggctcaagccatcctcccatctcagcttcctaaagtgctgggattacaggtatgagccaccataccaggccacaaaggaatatttaaccatttgaattaagctttgtatcattgcatccttagaattataaaggtgttagaatttgcctgtgtttagcaaaccaggaaagagagtatggatttagaaaaaaagaatacaggaaaaaaccttaaaaaccattctattattcttaacactgtcatttttgatagaatcaatttcccataaacaaagtgattgaaatatttatttttgttgtgtaattgtgtgaggcctttgatgataagtggcatttcttgatcatgtttaaatcctccagaatctggggctttgactgtaaagtataagacagaagtagaaattaccttcacagttacctgacacgtatacacctttattcatgaaacattgggtctggacatgacattgcatcaggccgtgtggatttcagaaaaagtgaaaaaccacttttctggatgtgtttcatgttcatcctaggatgcatgagggcctcggttggatgtaaaagtgtttatgagggagaagaggcagaaggaagggaagagatgaatataaggttaggaacacccggcgtctccttgttagagtgcagggagagatcccattcctgaaatataggttgaggcaggattgttgaaggagtagttatcgtagtttcaaatgtgcataatttgggcatctataaatccaaaacaaacatttctagatgataccacttttgagatcttaattattgacttaacaaacatgttttaaagtgtttactatgtgccgcgcacattgctaggaggtgggattaatgaggaataaagcacagatgacccccgatgccctgcggcttgtagttagcctgacaggcagcagacaatgttagagcaacaagctctgtatatgagataatacatctaatgttctaaatgggagaaatgccagatagagggaaatgctgtgttaatatcagagggtaacaaactcaggtttaggagggaaaggaattgaacacgagtcatactattttattagttgttaaaaacttcactgaatcattgatttcaagagtgatttataatctttgtttaataatagaggctatacatcttatttttaagtttgtccacttctgtatgtctgttttctttattcactatttgcctatcagtattccagaaaataccacaaaaaattaagtcaaaccatctaaatcgcttaacagccatttaaataaggaaataaagacgtcctcagcagaaaaaaaacaaaacacaaaaggaaatcaaaccacagtattctatataaaacattgcaaatgttcaagtatagaagagtgttgttcagcttattaatttcaaaatggttaaaaaaaatcagtatcttaaaaatttgtatacattaaaaattcataaatatgtttttactatttcgattttcaatgcttaagaagattaaagagtttgaaagtgaaactctggccgtggttccttcatctcttttcctgcctccaacctgtgtgtgatacttttgaatttctttttattttttactttacgttctgggatacatgtgcagaatgtgcaagtttgttacataggtatacatgtgccatggtggtttgctgtacctatcaatccgtcacctaggttttaaaccccgcatgcattaggtatttgtcctaatgctcttcctccgcttttcccccatcccccaacaggccctagtgtgtgatgttcccctccctgtgtccgtgtgttctcgttgtatgactcccacttaggaatgagaacatgcagtgtttggttttctgttcctgggttagtttgctgagaatggaagttctggccagggcaatcaggcaagacaaagaaataaagggtattcaaataggaaaagaggaagtcaatacttttgaattttaaatttttcatgacagggcccaaaatattcaggaaatattttgccttttaaaaacatacatgcatctgaaatagctgtctttgcacatgtgacatatgtgtttgccacgtatgtgtagagtgcacatatgtgtttgaggacagagctagtgaaaggaaaagagaaacattggttttagtgctgtttggtttccacctttggcgttcttggcccagtctgtgttaacgacaaaccactgggacatcccctcagtgctgtggggtcttttcctgccaaatattgttctcttgcaagattaaatagctgaatcagtgtggcccgaatcttgatcctgctgagaatattaagaatcctgcaggttgtaatacagattagctggtgagagctctgttggagaaataaagtgagtttctctaaatgaatttaacaactgctgtgaacctttttgtgtcctccagcgtgagtgtgtgtctgttggcagttaaccatttattcccctcattttctccaaaacttgttcttgtccacccctgtgcctttattgtaaacacttccataactatttcacattcaagttttgccagataaggcatttgatacattaaataactgagtactgtgaagggtaagccattatttacttgatttacttaagggagaaaataatattttttggtatttataaaaggaaaggactagtgtcatgggtataatgaaataaaccacaccactgggttatttggagtaaactgactagcatattggattctgatcctaggctttatgttattggttgaaaggcatgaaatatttagcaagaggccggacagatggttaagattatttacattgcttctaacctctatcccattattatttctgcttccagggttagatgcaaaccattaaagactctaaattccataaaaaagatgatacttccccctaaatgaaagaaatttaaaaataggaacaacactcaactctaaagcttgtccaacccatggcccttgggccacatgcgacccaggacagctttgaatgtggcccagcacaaatccatcaactttcttaaaacattatgagatttatacatgtaccttttgttagtgttaacatatttttttgtgtggcccagggaatcctaaagattggacacccctgctctaaagcataagacatacagataacctgaaaataattcggtgtttgttagattgtctgattgcagacttctgtgtaagtttgttgaattcttttctattttgggtgccccttacctcacttacgcatgaagcatgtgctcagtctgctatgaagccgtccttccatctgcttcctacactattacccttttgtctcctgacactgtgtgtgtgtgtgtgtgtgtgtgtgtgtgtgtgtgatttctcagtaaaaatgtcaatggctgtgatttgtaaatagcaaagcctggcacaatgataataaacaactatgaagctcatcagtgctgttttacttttgcagattactccatcgattattactgtgactgttacaattatatctttagaagttaaatatttagttaaattattttgtagttgtcatacatacaccaaaaactgggaggtagtggggtggggaggggaatgttgtcctaagagaaggcacaagaagaggggagcaggtgagtttgacactttctagcctgccctcatacaatagcctatgttttgctgttctagccaatgaggatatgaggatgtcagacaaagtaccttctcatcttaaatctgtgctgcctgaatactttgaaagttaccctacaactcccctaatgctctctgtgaaacactcagggctagcaccgaggcattctgacctctagtccaggttgccttttgttttcgacatatgactctttgaaactcacatccacaggcattgctgaaattcccagtcattcagaaacagactttcaaggtgtattcaaaaaaggactcattaagtattaaactgtaaatccttcagatatcatcagcatcatcctattctcaggatgcaccctgtactcctggttattttttaggggacctttgtatgtctcactaccaaattctttggagtcagtcagtttctggggatcttggggtggtgagcctcctggcacttgtatgggttccacagaagtagctattaacgattcaaaaaaacccatcagtttaggaggcaaaaaaataaatgttatcctttgttaaatgctgccaggatttccacatctagaatccctgattccagcctcctgatattaagactctaccccacttttagattgtgaactatattacacatacaaaacagttgatagaaaatatgtccagtttaaagaataataaaacgggactggcgcggtgtttgagaccagcctggccaacagcgtggtgaaacctcgtctctaccaaacatacaaatgttatctgggtgtggtgacgtgcacctgtagtcccagctgcttgggaagctgaggtgggagaattgcttgaactcaggaagcagaggttgcagtgagctgagatcacactactgcacttcagcctgggtgacagagcgagatcctgtctcaaaaccaacaaacaaacaaaaaacaaaaataataaaatgggtagccacgtagctactcctggctcaagaaatggaatatttgaaaaacctctgaaggtctttgtgtgttccttgactcagcttcatcctgctaactaccagtagcacgagggccacagcttcttgaaaacatagattttcatagtgagctcctgaaaagatgaaaagattatttgaaaatccaatttccatgtgcagaaacaacatgtagactttggaggaaacacgatgggctccttgctcatacagcctatgagggctgcctctcaccttcgttgtcctcatttagctgttcaagactcaagcaggggcctgtcaatcatctgtgcatccctgttcgtacatagatgacacccacatacccgaatagagggaagagatgagaacgaacattcatgaagggctcttgtgtgtcgggccatctttcatgtttgttatttcacttatttttagcaacaatccctggaaatacttgtcattattctcatttcactgatgagcaaactggcatttagagaggataaatgaattatttaattgcatacaatcagtaaagaacagagctgggactggagtccaagtttgttggtttgtttttcttttttctgacctcaaagtccagtacttgaatcctctacaccaggattttgggagcattgattatatgttatatctggagcccttgtgccacagagcaaatgtccaaagattttggtttctttttgtcggtacggaagctagtgtgttcttaaacggcattttgggatctgcatggtgagtattaggaccaaattttgaaattccaagtttcttaacactgggaaccagactttcttctcatccctaaggagaatctcactcagatgttcctttatgtgctgggatataagaaggctttgcatttttccagacaatttacctgtggtttattcacgtgatgcatgatgttattaagggttgatgctttttctccttcagaatatgcttactttacttgttcctccattctctgaaggtaccttttctgagcttgacactatcttaggagctgagggtacaagatctaagcacagccgtcaatgcagaacacagaacgtagcctggtaagtgtgttaagagtgggaatttttggagtacagagtaaggcacctaaccctagctggggtttggtgacggtcccagatggcttacagaagaaagtgtcctgagatgagtttttaagaatgaataaggatagacacaagtgaggactgacttggcagtggtgaatggtgggtggcaaaaaacttcgcatgtagggaaactgcacgtacaggaatgaagaatgagactgtgtggtgtttaatgagctgcaaatactaattttatcctgaaagttttgaagagtaactaaaaagtattttttagtaaggaaataaccctacatttcagggttattgtttgtttaaatattgagagtgcttaatctagtcctgtggtcaacttggcccttatgtggattggatttcactctaattgtcatatgggatcttgtggcctcttatgtctgactgttgagccgggtatgattatggcactaggatttgtacatgtctgcttttggagaataaaagggaaacaattatgatttcttgtatctctgtatgtcgaagcaatgccaattaaacaactaacttaggcacttttattgcattgatttagaattgaatgacaaatgttgagcaaaggtgtctgtgtggtttgtaaattgggcaatggtgtgctcacgctccaactgtgatacaagcctgggatagctagtctcagacatgctctcaggttggcaggtgtgagagagtgcaaacccatataaatatgtatgcctttagccttgcatgctgcattagttctcatacaaatatagagagaaatgctacattagttctcatgcaaacacagaaaatctcagttaacctaaaatgtctgcaatgtggggtgttctggtaaaccaattattatatttaattttatttatttatataatttattttattttattatgagacagggtcttggtcttgtcgcccaggctggagtgcagtcacgtgatcttggctcagtgcaccctccgcctcccaggttcacgtgattctcctgcttcagccttccaagtagctgggattacaggcacccgtcaccaggcctggctaatttttgtacttatagtagagacggggtttcaccagggtggcaaggctggtcttgaactccagacctcaggtgacctgcctgcctcggcctcccaaagtgctgggattacaggcattgagccactgcgcccggcctatatttaactatatttaaatacaagttaagccttaacttttattgtttttattgactgtgtgtctgaaagttagatggtgaaccataaggtagctaactttgactccaaaacttaaccgcctcttgttcattaaacagaccagagactagaccgtagacattgattgactagcataggtcattttagtggatacagacgacccaagagatggccctgggtccctgttgtcctcaggacactgtctggaattaccatgttttgccagcttatgaggatgcttgcttgaggccatttacctttgactcttaaagtcagaatacagagaagtaggatcctagtaactgaatagttttgaacgacttagttttacgtgtgtaaggaatcgaggacttgatcctagttaaaagcaaaggaagttggctttgcattgtagcaggacatgtgggtaagaaacaagaaataacttcctatgctatatggattatgtgataaattcgtaaggctctttcaacttttttttttattattatactttaacttttagggtacatgtgcacaacatgcaggttagttgcatatgtatacatgtgccatgttggtgtgctgcacccattaactcgtcaattaacattaggtatattcctaatgctatccctccccactctccccaacccaccacaggccgcggtgtgtgatgttccccttcctgtgtccatgtgttctcattgttcggttcccacctatgaatgagaacatgcggtgtttggttttttgtccttgtgatagtttgctgagaatgatgggtttccagcttcatccatgtccctacaaaggacgtgaactcatcaatttttatggctgcatagtattccatggtgtatatgtgccacattttcttaatccagtctttcattgttggacatttggcttggttccaagtctttgctattgtgaatagtgccgcaataaacatacgtgtgcatgtgtctttatagcagcatgatttataatcctttgggtatatacccagtaatgggatggctgggtcaaatggtatttctagttctacatccctgaggaatcaccacactgacttccacaatggttgaactagtttacagtcccaccaacagtgtaaaagtgttcctatttctccacatcctctccagcacctgttgtttcctgactttttactgatcgccattctaactggtgtgaaatggtatctcattgtggttttgatttgcatttctctgatggccagtgatgatgagcattttttcatgtgtcttttggctgcataaatgtcttcttttgagaagtgtctattcatatccttcacccactttttgatggggttgtttgtttttttcttgtacattgtttaagttcattgtagattctggatattagccctttgtcagatgagtagattgcagaaattttctcccattctgtaggtcacctgttcactctgatggtagtttcttttgctgtgcagaagctctttagtttaattaggtcccatttgccaattttggcttttattgccattgcttttggtgttttagacatgaagtccttgcccatgcctatgtcctgaatggtattccctaggttttcttctagggtttttatggttttagttctgacatttaagtctttaatccatcttgaattaatttttgtataaggtgtaaggaagggatccagtttcagctttgtacatatggctagccagttttcccagcaccatttattaaatagggaatcgtttccccatttcttgtttttgtcaggtttgtcaaagaacagatggttgtagatatgcggcattatttctgagggctctgttctgttccatttgtctatatcactgttttggtaccagtaccatgctgttttggttactgtagccttttagtatagtttgaagtcaggtagcgtgatgcctccagctttgttcttttggcttaggattgacttggcaaggtgggctcttttttggttccatatgaactttaaagtagttttttccaattctgtgaagaaagtcattggtagcttgatggggatggcattgaatctacaaattaccttgggcagtgtggccattttcacaatattgattcttcctacccatgagcatggaatgttcttccatttgtttgtatcctcttttatttcattgagcagtggtttgtagttctccttgaagaggtccttcacatcccttgtaagttggattcctaggtattttattctctttgaagcaattgtgaatgggacttcactcatgatttggctctctgtttgtctgttattggtgtataagaatgcttgtgatttttgcacattgattttgtatcctgagactttgctgaagttgcctattagcttaattaaggaggttttgggctgagacgatggggttttctagatatacaatcatgtcatctgcaaacagggacaatttgacttcctcttttcctacttgaataccctttatttccttctcctgcctgattgccctggccagaacttccaacactatgttgaataggagtgatgagagagggcatccctgtcttgtgccagttttcaaagggaatgcttccactttttgcccatttggtatgatattggctgtgggtttgtcatagatagctcttattattttgagatatgtcccatcagtacctaattgattgagagtttttagcatgaaggttgttgaattttgtcaaaggccttttctgcatctattgagataatcatgtggtttttgtctttggttctgtttatgctggattacgtttattgatttgcgtatgttgaaccggccttgcatcccagggatgaagcccacttgatcatggtggataagctttttgaagtgctgctggatttggtttgccagtattttattgaggatttttgcatcaatgttcatcagggatattggtctaaaattccctttttttgttgtgtctctgccaggctttggtatcaggatgatgctggcctcgtaaaatgagttagggaggattccctctttttctattgattggaatagtttcagaaggaatggtaccagctccttcttgtacctctggtagaattcggctgtgaatccatctggtcctggactttttttggttggtaagctattaattattgcctcaatttcagagcctgttattggtctattcagagattcaacttcttcctggtttagtcttgggagtttgtatgtgttgaggaatttatccatttcttctagattttctagtttatttgcgtagaggtgtttatagtattctctgatggtagtttgtatttctgtgggattggtggtgatatcccctttatcattttttattgtgtctatttgattcttctctcttttcttctttattagtcttgctagcagtctatcaattttgttgatcttttcaaaaaaccagctccttgtgttcattgatttttgaagggttttttgtgtctctatttccttcagttctactctgatcttagttatttcttgccttctgctagcatttgaatgtgtttgctcttgcttttctagttcttttaattgtgatgttagggtgtcaattttagatctttcctgctttctcttgtgggcatttagtgctataaatttccctctacacactgctttggatgtgtcccagagattctggtatgttgtatctttgttctcgttggtttcaaagaacatctttatttctgccttcatttcgttatgtacccagtagtcattcaggagcaggttgttcagtttccatgtagttgagcggttttgattgagtttcttaatcctgagttctagtttgattgcactgtggtctgagagatagtttgttataatttctgttcttttacatttgctgaggagtgctttacttccaactatgtggtcaattttggaataggtgtggtgtgatgctgagaagaatgtatattctgttgatttggggtggagagttctgtagatgtctattaagtccgcttggtgcagagctgagttcaattcctgggtatccttgttaactttctgtctcgttgatctgtctaatattgacagtgggttgttaaagtctcccattattattgtgtgggagtctaattctctttctgggtctctaaggacttgctttatgaatctgggtgctcctgtattgggtgcatatatatgtaggatagttagctctttttgttgaattgatccctttaccattatgtaatggccttctttgtctcttttgatctttgttcatttaaagtctgctttatcagagactaggattgcaacccctgcctttttatattttccatttgcttggtagatcttcctccatccctttattttgagcctatgtgtgtctctgcacgtgagatgggtttcctgaatacagcacacggatgggtcttgactctttatccaatttgccagtctgtgccttttaattggagcatttagcccatttacgtttaaggttaatattgttatgtgtgaatttgatcctgtcattatgatgttagttggttattttgctcattagttgatgcagtttcttcctagcctcgatggtctttacaatttggcatgtttttgcagtggctggtaccagttgttcctttccaagtttcgtgcttccttcaggagctcttttagggcaggcttggtggtgacaaaatctctcagcatttgcttgtctgtaaagtattttatttctccttcacttaagaagcttagtttggctggatatgaaattctgggttgaaaattcttttctttaagaatgttgaatattggcccccactctcttctggcttgtagagtttctgctgagagatcagctgttagtctgatgggcatccctttgtgggtaacctgacctttctggctgcccttaaccttttttccttcatttcaactttggtgaatctgacagttatgtgtcttggagttgctcttcttggggagtatctttgtggtgttctctgtatttcctgaatctgaatgttggcctgccttgctagattggggaagttctcctggataatatcctgcagagtgttttccaacttggttccattctccccatcactttcaggtacaccaagcagacatagatttggtcttttcacatagtcccatatttcttggaggttttgttcatttctttttattcttttttctctaaacttctcttcttgcttcatttcattcatttgatgttgcatcactgatatcctttcttccagttgatcgcatcggctactgaggctcgtgcattcgtcacgtagttgttgtgcgatggttttcagctccatcaggtcctttgaggacttctttgcattggttattctagttagccattcgtctaattttttttcaagtttttaacttctttgccatgggttcgaacttcctcctttagctcagagtagtttgattgtctgaagccttcttctctcaactcgtcaaagtcattctccatccagctttgttccgttgttggtgaggagctgcattccttttaaggagaagaggcgctctgatttttagaattttcagcttttctgctctggtgtctccccatctttgtggttttatctacctttggtctttgatgatggtgatgtacagatgggtttttggtgtggatgtcctttctgtttgttagttttccttctaacagtcaggaccctcaggtgcaggtctgttggagtttactggaggtccactccagaccgtgtttccctgggtatcagcagcggaggctgcagaacagcagacattggtgagcagcaaatgttgctgcttgatcgttcctctgcaagttttgtctcagaggagtacccagccgtgtgaggtgtcagtctgcccctactggggggtgcctcccagctaggctactcgggggtcagggacccactttaggaggtagtctgtccattctcagatctccagctgtgtgctgggagaaccactactgtcttcaaagctgtcagacagggacatttaagtctgtggaggattctgctgccttttgtttggctatgccctgccccgagaggtggagtctacagaggcaggcaggcctccttgagctgaggtgggctccacccagttcaagcttcctggccgctttgtttacctactcaagcctgggcaatggcgggcgcccctcctccacccttgctgccgccttgcagtttgatctcagactgctgtgctagcaatgagcgaggctccatgggtgtaggaccctctgagccaggcacaggatatgatctcctggtgtgccgtttgctaaaaccgtcggaaaagtgctgtattagggtgggagtgacccgattttccaggtgccatctgtcacccctttctttgactaggaaagggaattccctgaccccttgtgcatcctgggtgaggcgatgcctcaccctgcttcagctcacgcttggtgcactgcacccactgtcctgcacccactttctgacactccccagtgagatgaacccagtcccccagttggaaatgcagaaatcatctgttttctgcgtcactcacactgggagctgtagactggagctgttcctattcgaccatcttgtctccaccccctggctctttcaacttttgaagtgacctgtttcagctgaacattgtacctcaatcactatgcctgttttctcctacatctctcatgggaatgataatatctgatgcttattttaagttgggaggatgaatgaatgcatgatggaaaagccctttgcgtgactcagaagaaagttgctgttaaataaaaatatgaaatcgagctttctcagtggagatgggtacaccaaggggtgattggctttccttttgggtctttaagaattttattaacatgtaattgagagacatgggaaaaccagtttagcatggtttgggagagttggggaagtctgtgtgccctcatgtagggcaggagaaagctgagcctgtgtcattgggctgcacttggcaggtgcaattttaaatccttccagatcacacatcgaaagcaaagtggtggtatttattcctaatgattccaaaatgttttgctttgaaatgcggattaataccaggcaaaaaacgggatgtttgatgaaaggtcccatttccttcttatgcttttgttctttttaagagtatgtgatatgagctagtgtttatgttgctgctgaaaaggaatcgacccaagcttattcataaggtgggagatgttcaagcctgttgaacagtgttggattaccaggtcatttgcaaggtcagaaaaggcaataattagaacaggcagaaattaaactataatgagtggtaatcctaaagaaaattgaaacacagaaaacactgcattatttatttagattcagtgagaagttgccaagaaagaggcagctggccttctgctttttggaatgtttgtacactagagaaggagctgtcccttggatttaagctctcacttaattcttgctctaaggccagacctaattgtaaaaggaagtggggaacagacatagttaattatgtgattcaggacagaaaagacatgggccagagtgacaagcagactgaatttggattctgcttatacagatttcataatctttgtccaccattttttaggttccatttgcaatagcctgttaggcataaacagctgatttgagagacagactagacctgagttctgatgcccacatcttttttttattgccccttttaccgtaggaaatagagtaataaagtgattctgtttcattcactttattatgtctaagtttccacatctgtaaaatggaaatgaaaatatttgcagagtttttatgagaattaaatattagctcttagaatatgagtaaaagatttgtcattgtgcttaataattggtagttttgttattattatgcaataaactgaaaatggaggaaagattttggcatggaaatgctttaattagtcatgtcattttgaatttgtagaagtagcagcagtatttccagtcttcaaatttattgccatttgcaacagtttattttatatttatttggattttttagaaggcacgttattttgattaccatcccttacagttttagatataatatctttattaaatagtgctgcaatttttttctgggagctaatgtccattatagaacttccagtgataagagtggaagttgggcctataatgattctcatgtattgaaggtgaaaaaaattcttcttagattattatttcacaaatgagctattttgcaatttaaactcaggaccctaagatttttagataatttcctaatgattctttgcatccttacaagcattgtgataagcatcaagattatttaagatgggatggagaaaaccgtgtatttcttctgaaattctgtattttaatttaaagaggtaacagtgttttaattctgcttccatttcattaaaaggcacagattccagaatcagtctctcattgcacagtatccttgcaaaggaggagatctgccaaagtccgtgtgatttccaggcgatgcaaatattttaaggctcactaccgaggggagcatgttcttgggggtgttctcagttctgttatctgcattcttccatgtggtgcttagtgaattcgatgaagagatgctgataatcgtctgctgccttacttgatattagcgtcacttgtaggctcacagttgccagttgtcgtgttaagcacagtcttgagaagattcaaaatttctgttattttttatccagaaatgaatctatgttgtgatctttgttattgatacccatgttgtgtattatacaaaatctccatctgagaggagatggtggatgcttcctcggggtgacttttataatgcttaccacactgtgttgaaggactgattgaatttcctctctttctagccaggtagactgtggttctttgagctcagggaatgtggccagtcatatttttaaccctagcaccagacatggtacctggcatgtattggccttcagtaagtgttttaacgaataaataaaatcgtgtggcactttgcttcactattgcacagcatgccagtttatttccagattcatttccaatcacaactcttgacctatcgtgatactgtcctagatctctcttcccattttgttcctgctagaaatgttgctatgtcttaaagatttgtctgttaatgaaatagtaggtgcattttatgtgctgtggttgcaccttgtatgagtcaggaagttagctgctgaaataaacaaccttcagatctcagtacaatagaggtttattttactctgacactacaaaccaacacagcttggtagcagagagggggcttaaaagggctctgttccatgcagtcattcagggatccaggccccttctgtctagcacctctcgtatccagtggggccatggcattctccactggatgagctgtatctggtgtgcagtcaggcaaagagcgggcccatcgtggatagcacgggtttcaggttcagtctggaagtcatgcacgtcacgtccatccatattccacaggctagaattcagttttgcggactcacttcactgtggaaggctcaaaatgtggagtggtgtggcaaggagaatgactaatgagtctgcgttagtgcacattagtaagtccctgtggcacactctctgatcaaaaagcacatcctttgagactaggcagaaatagtcccaaacactttatatatcccttcagctcctgagatgcttgtcatattctcatgacagccgaatttgagtttcaaggagacctaggcactctctgtaatagaaggaatacttggggctcagaacccatcttctttgccttttgttttgaccgtagacctgtctgtgaagtcttgctcagtcccagatgagactaaagtccagtctgaagcagggagtgagaacttgcaatcatttcataaatcaggcacaaaaagttgaagtgtaaaatggggcctttttttttaaatttcaacattaatgaaaacatattttaaaatcaacctgtacttttacaaaaaatacaaaagtaaagatagtgaaactgatagtgtacccagctggccatatactgaactgagaaactcctaatagttggtgataaggaaatggcttcttaaacactcatctccccaagataagaaccgtcctcacttgagaactagaactgagtggaggacacctgccaatgtcatttgtgttgtatctgaattcaccaaaccgtgaggctttattgtattttcttatgtaactttctttttttgtttttgaaatggagtctccctctgtcacccaatctggatgcaatgcaatggtgtgatcttggctcactgcaacctctgcctcccaggttcaagtgattcttctgcctcagcctcccaggtagctgggattacaggcacgtgccaccacacccggctaatttttgtatttttagtagaaatggggtttagccatgttggccaggctggtcttgaactcctggcctcaggttatccacccgccttgtcctcccaaagtgctgggattataggtatgagccaccgcacccggccttcttctgtaactttttaaggtttatatttacctgccactcctgagagtgagtcagtcatatagtctagtagtgtacgggtaagttttgaggctattttctgaaaataactttggagtcatatttgttgtgaaaaaactagttcttaagggcatctgatggcttaaaaaattgacactttctttcatggtcacaggtaacaatttataaatttactataaaaaagggcttaattagtttttgggtcaggagggactgatgcaaatggtgaaccataagtaatctaaaggcttcaaatcattgctggggatccccagttcatgcccacagaatggcaaacacatcgagagaatctaggttcttctaatcgattgtaccttttttttttgtcatgcaaacttgtgcatgcattttctgaagtgttaatgcagttagtatctaatgtacctaatttatgcaattggatatttcataaatgggttttctgcatgcaagcatttgtacacattaatatttatgcaagtattcaaatcaatgcaagggcatctgtctgaatctgtgatgaaaatatgcatatgcatgaacatttgtactgggggataagtccccaaagttagggattgctgaggttacagttttcaacttttgtccttttggcaaagttttcttgattaggaaaggcatgtgaagaaatagcacaacgattagtatcgacaaataaaatggttttatgtaaatatacgtaatagcaagtctattgaagttcctttaatcagtgatatgatttttagaaaatgctattttagaatgtgtagcagttttcagcaagaatacttattcttttcttaaaaattttaaaaaaattttactttaagttctgggatacatgtgcagaatgtgcaggtttgttacataggtatacatgtgccatggtggtttgctgcacctatcaacccatcatttagattttaagcccttcatacattagttgtttgtcctaatgctctccctcccctttctcccccaccccccagccccaggccctggtgtgtgatgctcccctctttgtatccatgtgttctcattgtttaactcccacttgtgagtgagaacatttggtgtttggttttctgttcctgtgttagtttgctgagaatgatggcttccagcttcatccatgtccctgcaaaggacatgaactcattcttttttaaggctgcatagtattccatggtgtatacgaagggcacttattcttatatatgagtacgggagacaggtacgatatggtggtttggactaagctggtggccactggaatggagaaaagaagatgaatttaagttttgccttggagatagatggataaaacatgctgaagaatgaaatgtttgtaatgagggagtagaggaaacaagaatgtctcctagaatattgtttctagtaaatgggtgagtggtgtggccagttagcttagatgaggaagaccagggaaggaatacatgaaagaatatgctgttagtaataaaataatttgtgtaagaaatgtttgatttctttattatttctttccttactttggcttgaatttgacctatagaaataaataggcttggttagtgtgggactttctttacctccttccagatgcacataagaatgtaaaggatgatagaatatggggctggggtggggaagaagagttttgatttcaagttcttggtggtcactgttgagaccctcgtccatgtcatgtcaggtggctctaacttctgcgccctgcatgggccggagactctttcccaggttggaaactccagcgtctgggattgaccgccctaggcaggccaaggagcctcccccaggaggcctggactttttccaggccacagccatggcgcaaaaggactgacagtcctcattccttgatgatctactgactctcatcccatatctttgttagtttagaggaacatttctttttgatctcttatgttttcaattctgatttgtccatttattagtttcaaatggcaaagtgtttctcttaatttataaacgtatttatatactggtaaaactccagtcttctatgttagcagtttatggcaggccaagaataaacagagttgattctgaaacatcagttttgcagtttaaagatgtgccaaagatttttttttaaaaatctcattgcagaagaatttaatatctaccagctgtttagaaggattgagaattatggtgcgtctttgtcatactttgataacatcttcccaatgaaattttggttagtttattttgagctgaaatgctagagagtttattttttttttcttatgggaaaggaaaggttgagaaaattatgaatgactgaggtgtgaatctgaaaggactggcttgctcagagttgtgatgtctttcctgaaagcctaaacagtactgattttccacgattgactggagtaaaggtacaggcgtttgtttctatgttttgtatgtttagggtaaggctgtgactgtccacacagcagatgtcgattggttagatgttccagattgcaaatggacatacaatattgcctactttgaatgttttccagttagcatcattctaggcaaaccttatggtatgggatttgggtcctggatctccatgctcctgtgtggtaaaagaggattagaatcatttgtaaggaagattttgtctctccagttggcatttatgtggctcatgtctaagtagaagccgtctatttaggctcaaggcagaaggggtagcaagtgggaaagttctgcagtgaaaaggaggatggtgtgtcatcagtggagagaaagctggactgagcaaaaggggaactggtgtaggatttagtaggagagactaggcagggccatggtagagctaggattttactgtcactgtcatgaaagttttgaagtaaaggtatgatacaatttaatttgcattttcaaaaagactaccttggctgatgtctaggaaaaatgggttttatggtgcaagaatgtacacagagaatgagtacaggagacacgtgagatagggtggtttggactaagctggtggccatagaaatggagaaaagaagatgaatttcagttttgctttggagatagatccaataaaacgtgtcgaaggatgaaatgtttgtaatgagggagtagggaaaacaagaacgtctcctagaattttgtttctagtaaatgagtgagtggaatggctagtcagcttagatgaggaagactagggaagggataaattaaaggtagacacattttggttggatgtggacatctaaatggaggtggccgttaagctgttctctctactagtgtgaaactcaggggagaaggcagagaagaggcataaatgtgagagtcgtcagcacctagatggcatttacaaccctggaatgaggcgagatcacccagcgagaaagtttagatagaaatgagaagtggcccagtaccaagcctgaagctctctaacctcaatttttttatttttattttttatagacttagaaggtacaggtgcagttttgttaaatacatatattgcacagtggtgaagtccgggcttttagtgtaactgtcaccccaatagtatacactgtactcattagtataccctgtactcatttcgtaacttttcatctgtcatcccctcccaccctccccactttccaagtctctagtgtctattattccactctgtatgtccacgtgtacacattatttagctcccacttgtaaatgagaacatgtggtatctgacttcctgagttatttcacttaacgataatggcctccagttccatccacattgctgaagagatatgattttattctttctctgagtagtattccatggtgtatgtgtatatgtatacatagatgcaagggcatctgtctgcatctgtgatgaaatatgcataggcatgaacgtttgtatcagggggtaagtcctcaaagttagggattgctgaggttacaattttcaacttttgtccttttaacaaaattttattgactaggaaaggcaggtggagaaatagcacaacccttaatattgacaaataaaatggttttatgtaaatatacttaatagctgtgaataagtctattgaagttcctttaatcagtgataggaatatatatatatatatatttatatctctcacattttctttatccagtcatctgttgatggacacttaggttgattccgtatttttgctattgcgaatagtactgtgataagcatactagtgcagatatatttttgatatgttgatttcttttcctctgggtagatacccagtagcgggattgctggatcaaaatggtaggtatggaggtttctcaaagatctccaacctttagaggcctggtggaagaggaggaacaagcaaaggtgggtctactgagatgagagagaattaagaaggtaagagaggaggcgatgaattggaaatagtgaatagaggtaatcatttaagaagttttgctgtgaagggcaaagagaaatggcactgaagatggaagtagtctaagatcaaaatatttttgttgtatttttcatctttgtttttaaatacaggagctacaaaagcgtgctttaattaacgttgatggaattggtctggtagagtaggagaaaccggtgatacaagagagagggattacagcaggagcaaagttctagagaagggtggaaagaaggggatataattcaaagcacaagtatagtgttggccttcagtagaatccaggaatatttccttccattggatcagaagggaaagcagaaaatatgtctacagttttgggcaggggaaagtgagacacccacaacggattgcttctgctttctgtattctcatgggctctgcctgctatttcttctccttttctctccagtcctttttcttagcgcttaagatttgtttctgcacatctccagtctcagttcagttgtttatgctgtatatatgtctgagttctcttgtggtgcctgcaagtgatggcatagcctgacccagagtaatttttttaccttagcactcagctgtgtagcatggtagccactggccacatgtgactactgcctacttgaaaggtggctggtgtaactgagaaattgaacacttaattttacttagtttaaatgtaaacactgatactcaattcagttactggaaaaattttactatgtttgggacatgtgaatctactttttcaactgtaccaagtatttcagatgatgtttagcatctggattgagatgtgctgtaagtataaattgtacagtgattttgaagacttagctaaaaaatatgtaaactattccattaataattttatatcaataacgtgttgaaatgacaatttggatctgctgagttaaaaatatattattaagttcatttcgttagattaaaaagaaactttttaaaagtacctcctagcaaagttaaatataatatgtggctcacattgtatctctgttgggtgacactatcttacaggatgaaagcttcgtattttatgtgtatacttggtcgtgcctatctaggagtaagtcatatcttaccacgagaagcagaaacagtttaggaaacatagcctcagagagtttattcttcttgcctaaggtctcagggctgcaaaactgggatttgaaccctggctgtctggctgccacaggctgtgctctggactgtataccacacataagtcattctgtgaagtcttgcacttgagttattctgtgtttacactggcaaaggatatttacacgaacacttaaaagataggttttggtttttaactcatagttgaaattatgactctcagagtatggttttaatgtactgttactgactttgctttgatcaaattgaggatacacagtttatagttagggatctccttgtccttaagctcataggctaacagtcaactcttttatgtgtcttatttactatcagtgatgatcaccatttgctctgtggagtagatctacaagaaccaaacttcttccatatttgatgacattctttttctgtcttcagattaagatttcataaagaatctttgtgaagaaaagatctatttaataggaataatttaaagttaatataaattttaaagggttgaagttcatagtcggctatgatgttctgtgggcatctgcgggtcagcacatcccaaacttgaactcatggtccattccttttattcttcttcattccccatcttatttaatgttatcactggacacacagtggccagagtagaaacttagttatcctccgctcctgagcttctgtctctccacatgcagtcgcgttgaaactcctctccaaatctctccagttcctcccatcctttctttccaccaccaccactgcctagtgcagaccttctccattcagttgtgattgttcaatgatttttcctccccactcatctgtgatctcttaggagaggggcctttgtctctttcatctatgcatttttaggtcttagctgagagcttgtgcttagttgatgggaatattcataggttgtgtttctcttcttttcagaaattgaaaccgatctgtgtttactctctgtttgcgttcttttctcctgaatactgttagcaaagcttattcagcatcactcttcagctggatgtgccatcggcagtaatgctgctggccattgctgaatgcgagacgacacactctccccctgcacccgctcagctcacatgaatccagctaaaatccctccctggctattccaatgaatgagggacagatttctttcctggagcataagtcctatagtaatatgcccctaaggaatagaatgtgatagaaatccttggaatacgatatctcatacttgataaccttgggacaaactgtggataattttcatataggtataggcagagcatcaggcacatggtttataagccaaaatgtttgataggaaactgaaaaaaggaaaaatgagatcataaaagaagcaaaatttcacataatcaaatcacaagtttgtttaagccctcttagaaaaattagtcaagttttataaaggattgcaaaagaatcccatgaatataaatcatgctcagagctctgtggtaccaggttacttcagcatttactttgggtctgtctccaaacaggatattatttcagaaatgaatctgcagcaatcctgtccctggtgaaagggaaccagttctttttgcctgtaacatagcaaaagatgccagtagcgactcaagccatttttttgtgcatctgatgaagagatgttggtatttttatatggcctataagatttcataagaggcataatggagagtttagttaaacaaaatgttcttttctgctctttctcaatttactggtggcaggctgggaatggtgggtccatatgttatggacacctgtttacgaatggcccacacctatagacagctggcctactctttccaggacacctactgaataagagtattgtgaaaaatctcagagcttttgaagaatagtttgactttcagctagaggaaacaaaaaaactgcccaaaatgtcgttaattagagaaagctctatgtccagattttccggcatgagacaatagccaatatggctgacctctactccaaattgtgtactcttgatagcttctgttctgcctttttttttttaattgttgttctctctggaattccaataatgagttcaacttagttaacaaacatctttctaaatgtgtgggttaaggagttggcagcaattcatataataattagtgtgaaatcagattgctttctttcagaataaggtaagtcaggccagccactctgaaaaaggtgagtgtatttattggtgtgaggaagtccatgcttttggagggtggacgctttgggaaaaaggacagagtagaaccagtcaagagagagaaggtgaagggttcagggaagctctacaagggggatggagggagggatactaggtcataagaggggaaagatgaacttttgctgtttcagagtattcctaggagccatcctaatgttgatacaaatattccatccataccatggaatgttccacagtcattaaagaaataaagtagatttatgagtaaaaagaaagtgaagaacagattgcattgtatatttccatttctggatataatttgaaagatgatacatgcatatatgcatgtatatgtttgagtatgtgcagagagtatttctggaagaaatgtaataaacagtgactttgtctctacaaaaggagcctgggggatctgggtctgaggtattattttatttccggggctacactttgcatttttgtgtacattacttttaatttttttttaatatgctagttagttttctaggattactcttacctctaagagaggtggtatagagcagggggttgggggtctgcagatgggggagaggagacagggaagggacagatcatctctttgtcctttgttcttccaagttacaaacctcagggaccatgtacccctcgactcctgcagttttatagcgccagccggattatggttaactaagcttttctgggctgacctggaactgaacgaccgtttgtaatctctttctatgggggaagctctacagtgttccagagagcacacttaaccaaactgcctccagccattttctctccctttcatgtctatcactttcctcaccttccctcaccttatttttttttaaaaaaagaactttggatttattccaggaggccctattctttcacattctcactcatttcatcagaaatgaccagagccctatatgtagttatgtgcttggtgcttagctacctgctgggatttttttttttttttatacaagatactctctgtattgcactttctcttccgaggagcttattttggtgaacgaagtgcaaagcaaaggaaaggtgtagcctttttttttttttttttttttttttacttcatgcctgatcgagagctataggcatttgatacacatctgtcaaatcggtaacttaaggtgtggatacaaagcagataggtactgtaagttgtcacaggtgaaactttcagggtctcagaagacacagggcttctcaatcctggcattattgacatcttgggctgtgtattatacaggtttggaagcatccctggcccctacccatgaaatgccaataagagcctctaatcatgacaattaaaaagtctttagatattgctgaatgtctcctgggagcaaaatctccctagctgacaatcaccaatttagagtgattttggatttgctattcattgtccaagaattgctgtatatcgagaggaaactcttcaaatcctggggacctagatgtggggcccagtaaagctcctgaaagcttacatagtgtctttgtgcagaactagaagacacccagatgaattagaaaagggctagataggaaatgtaggctgggaatgtgggctgggtttcatcctccagctctcccctccttttattcctgctgggttcctagatatgaggagctctaagtcaagggtctgccttgtgttgatagagaacaggttcttggagccagtactcatgcaaagggatgaagtgcaggcttgacagcttcaacattaaatcagctgtgctgtggtcacttccaaatagcatgtcaagaaaccatttcttttttttttttttttttttttttttttttgagacggagtcttgctctggagtgcagtggtatgatttcggctcactgcaatttccacctcccgggttcaagcgattctcctgactcagcctcctgagtagctgggactacaggcttgtgccactatgcccggctaatttttgtgtatttttaatagagatgggatttcactgtgttagtcaggatggtcttgatctcctgacctcgtgatccacccacctcagcctcccaaagtgctgggattacaggcatgagccaccgtgcctggccagaagacatttcttattaatatgaatacgtggccaggtgtggtgtttcatgcctatgatcccagtacttgggaggctgaggcaggcagattgcttgagcccaggggtttgagaccagcgtgggcaacatggcaaaacctcatctctacaagaaatacaaaaattatcttggtgtggtggtgcatggctgtggtcccagctacttgggaggctgaggctggaggatcgattgagatgggagattaaggctgcagtgagccgtgatggcaccactgcactccagcctgggtgacagagcgagaccctgtctcataaaagaaaagaaaagaaaaagaagaaaaagaagaacaagagagagattgtatttctgtgaatgcattcatttaacaaatatttatattcatttaacaaacattctaccaggtactggaaggaaaagtgcttccctatactcccctctgccttatctctgcctgaagtcatcggtttctgtgtgtttggtattatcatttcattttacatttttcagaatctgtctagcacaaaatcttctcttccctttccctttaattgacttggtttctgaaggaccaattataattaaaaggaaggggagcaacggaagggatgggatggctcgagtgctcagaatgttccttagctgtgtgtcaggctgggtgagtgcacacccatgctgggctgcattctggacggcctccttgactctgcctatatttataagttatcctacattgcgttagcacgtcagctgccaaggcagtttgtagaatctccttccctggaggtcttcagaaatagaacaaaatgcccatctgtccataatggctttgatgcagtcctgctgatgagaaggaatagactagatttttctgtcaaggttggtttcagtcttgagtgctcttaaatggatgagtttgctttttggtataggagggagggatgtaaagtgacactctatgaatttattggagtatcactgtacacatcccggataaatggagaataaaacatatcgttctcatgcttttaatgtttctgaagcacttagtgcattcagagcctcacaacagccatgggtagggggatggagggagggcctatatttgggtcgctatgacacagagaggagtcagtgaggcacagaatcatttaattctcagccagagtcacagcctggctgatgcagagcagagttgccattccaggttgcctgctctccagcgcatgtgcttttctcttgaccctgttgcttctttgtgtttgtggtttttgctctgtcatacagtgtccatacaattgttttggaggcataaaatttcagagccaaaacaattttaggagcctacttaggagaccattgcttgctctattttcctttccaaaaaagtgcattttcacataaaattgtagtgaggtttattactaaccttacacagacacatatatgttcacacatatttttatatgtacttatttagatatgtatatgtttgtgtatatatgaatgtgagtgtgtggatgtatggatgtggaaatataggtatagctatgtgtgtgggggtgtgcatgtgtgtatacatatgtgtgtgtgtgcatgtacatgtatgtgtgtgcatggatatgtgtatgtgtgtgcatgtgttgtgtgtgtgttgtcacatattaaggtgcagcaggaaacaaagtaaacccacttattggcaaataaagagagtttgcagagctgtgggcatgattaggggaacaagcaagggatagtgaggtgccccgagattcaggaagtcatgaccaccctctgggctgaagcccatggagaactggaattgtgggaggggatgctgccagagggagacttagttgtgaggatgaggctattggcagagaaagaactccagagaagggagggtgtgaggaagaaataccctacctccctcttatcctgtcatctgatctcccgttcctgcctccattggccaaactcagttggatgggaacctgcaaggaagcccaggagatgcagtgctcaggttcagggtctcctcctgggacatggaacagggcaggggaggaataatggagctgggccggaggcaaatggagaatactcaggtaggtgcgtgtgtgtgtgaatttgtccttatttttccaatttcaccttagagctgaaaaatttggcatggatcagcactactctgtgttggcttcacagtttaaataaaatatcagcatttgtttcctgagttaggaaaaggcataacttcactttctgggtgattatctcagactattcacgaatgtagattggaaatattctttctacttttttgattccctgttcctactgtcattactccagacattttcagtggacagagctggtaaacacatatttctttgaaagagaaaaaatataatattttcaaaatatgaatagcaagctggctagaaataaatggacctaatcatacatcaaatttagatttataaaatgtgtgtgtataattagttccatttatttcagcttagtataattagttccatttatttcagctatgtaccatttgatttcaaatggtagagtttgctttgttttgtattctgagttatttatatatttttaattgtataaaagtttccatgattttccaaactgatgtttattaagagagatctcacttttttccccatttcttccttcctattctgacctttacttggtaaatattttttcttctttttattagtttttgtttgtctttatttcttttgaatacagaagtaaatgtgttcatatagcatatattctttcatctcttaaccaaatggtaatttacagtacacactcttttgtactttgctttttcctctattgctgtatcctggactccttagcggtatgcagaaatctgccttatacattttgacagctccagtgtgtcgctggactacaatttctttaactagtcccttgttgatgggcatttgggttatttccagtcttttgctattgctagtattgtaatgaatagtcttgtatatttatcatctcatattttttaccagtacccctgagggttggttgttataagagtgactgatgggttaaaaagtgaatgcatatgtcattttgctagatattgccaaattctcctccactggggttgaaccagttatgtttccaacagtaatatatgacagggcctgtttttccacagtccaacagaatacgttgttaaactttggagtttttgctaatttgaaaggtataaaatgtcatgttcttttaatttatatttctcttatcaccagtaagaagcttgggcgtcctctcttacactaaggaccatttgtatctgttttctgtgaactattcatcttttgtccatattgggttgttgattttttttctcaatttttagatacttcttttatattaggactcttagcccttcatgatgcaatttccccctgctaccttgcttttgcttgcagtggtggttttctttttctgtgtacattttagattattattcatttttattttcatgtagtcaaacttatttttatgtagttgttatttttcctgtaggttccggattttgagttaggaatggtttcccactcccaggttgtaaagcaattcccctatgttttgttccacggtttcatattctgcatttggatctcatttggaatttatcttggtgtgaggcatgagaaatggatccaattatatgcttttcctgtgttgttgtaacattatttattaaggggttgtccttttctcccttttcttggatgacgtttgtcctgtggacatgggtctatctctggactgtttatctcattctatcggttaatgtttcaggagcacacagctctaataatggaaattttctttataaaatggattaaaagtactttaaaagtcaccatgacatgattcccatgattatagaaacataaagtttgaaatggtagaatttttagagataccctatgaatgggctacccttattcttccaatgtgcatagaagggaagtgaggcttacagaggttgcacaaacctatccagtatctcccagttagtcagcagtgggactggaacctatgttctcaaccagtacgttgcataattttctaaaaagtatataattttctcggaaatcatgagagactaatctcccagcaaagacttaactatagctcagatgccttctcttgccacaaaatattttttttagttttgaatttttaggatagcacataatttagcttatttttaattatcatattgcatcttaaggcatttggaatctttctgaaatgagtaatagtaataccaaaggaaaaaatattccagaattctactactgacctccagaattgtgttacttgggtcaattccttccagaattttcctatgcataatgtttcgctttattatgatcatgttaagtgggaacgattttaagagaatgacagtaatattatttatttatttatttatttaatttatttttttgaggcggagtctcgctctgtcacccaggctggagtgcagtggtgcaatctcggctcactgcaagctctacctcccgggtttacaccattcttctgcctcagcctcccgagtagctgggactataggcgcccgccaccacgcctgtatagtttttttttttatttttagtagagactgggtttcaccgccttcgccaggatggtctcgatctcctgaccttgatctgcccccgtcggcctcccaaagtgctgggattacaggcatgagccagccgtgcccggccccaatattatgcatttattatgtacttacttaagtgcactgattcaagtgctctaagtatattatcctatttaattatcacaaaactcatctgaagatgcaatctttattatttcactactactgatgagtaatgattggctctgagaaattaaataactttcccaaactcacaaactcggtgaacagtggagcttggattcttttttttgagacagagtcttgctctgttacccaggctggagtgcagtggctcaatctcagctcactgcaatctctgccttctgggttcaagcgattctcctgcctcagcctcctgagtagctgggattacaagcgcttgtcaccatgtccagctaatttttgtattttagtagcgacagggtttcagcatgttggccaggctggtctttaactcctgacctcaagtgatctgcccgccttggcctcccaaagtgctgggattacaggcatgagtcactgcacctggcctggagcttggattctaactcctgtgtgttttctccaaaaactgtatttcagccactattttcattgtgtcatgcatatatcattttggatcctgttattttattagtattttaccagaaatgttcatcctcattttctcaatgatcatattaaattttatttataatatcatctttcttttaacacaattaaatgacctaaaccagatttcaataagagcaagttaagaatattttttcttcagttagtatagaatcttggcttctcaaagaagtatcttgaaagtgaaatataaaatagaacaattatggacaaggtcaccatgagacagaaacacacattaattttatagacatggttgctgctaagtgttttacatgatgtttagagagcattcactttcctgttttaattgaacttggaagttttgtttatgtcaaaatttgcataagtttcttaatttttcctagcccttctaagatccacattgtctcaaaatccaagttaaaaatgaggtacgtgatgcatagtaatgtgtggccagcatgtgaatagttcggactttttgcatacattgagaaataaatagacatcccctgaacagtctcaactttcagcctaattcagcaatgctccttctaccctttgcttctgttgtgacgccaatgggtatatcagtgaaaaagatgaaaaattctttgccattatgggtttgtgcccctcgagaaatagttcagaggacccttgaagaaagaaatgaatggaatgtatcaggctaatgtgaaaatacaatattagtgattgttagaggacagtgttttgcctgtaacattttaagtgtaattttgtgtttgtgtgtatgctgggtgaggacaaaatggtagactttggacttacaagctgattttcaacttcataaaaagttaatgttcttaccagctttgtgctaggcacacatggataagtaggctaaaccaggtctagttcccataatcaggagggttataatttaatgcacagaatgtattttttttcagtatacagtccctttcactaaataatagtctgagttcattccctaggatattttatatttactataaattatatgcacatgctttgtaaagttttcttttttgaatgttggaactaaaaaaagtcaataaatattctaaaaagtctaacttttttccccatgtcaatacactgcaggacttgtatattctttttcaaatattcataatgtgtcactctagtggtaaagtataaaatagcctattgccttgaggaacttcagatgggcacgcattttatacctaagccaggttagaagcttttaatcaagagaatatttgaaagttaaatcaagccaggcgtggtggctcacacttgtaatcccagcattttgagaggctgaggtgggtggatcatttgaggtcagcagttcatgaccagcctggccaacatggtgaaaccttgtcgctactaaaattacaaaaaaattagccaagtggtagtggtgcatgcctgtaatcccagctacttgggaggctgaggtaggagagtctcttgagcctgggaggtgaaggttgtggtgagccaagatcgtgccactgcacctgcactccagtctgggcaacagagtgagaccctttcccaagaaacaaaagaaaacaaaaaattaagtctttttcttcttcttcagagctatctaagaaatatttcgtaatagaactctagctgtttttatatttttaattatttaatttttaagcgatagtttgcttctgtttccctccttccccactttgcagtttctcaggtatagttgtttttcagagttgtataggttaaggtgttgggaactccataacccatggttcttgcctgtagttctaaaattctcacatttagcagtctgcactcatcaaacatctagttgaactagatgactgattaatcacctcgtgattcattgtgttttacttctcatctagtaaataaaagattatttctgaaattagggctgacttagttaataacggtttatcgtagaaagacagtctgttatgtcttactgtcctatataactaagtgataaggttatgacaacatttggtaatgcagtttaacaattttgttttaaatagaatgttcgttgaatacctggatataaatgtttggttagcttgcagatccaattcaaaagtttaaaaatttcagagcctgcccttggggaagtcagtgtggtgattcctcagggatctagaactagaaataccatttgacccagccatcccattactgggtatatacccaaaggactataaatcatgctgctataaagacacatgcacatgtatgtttattgtggcactattcacagtagcaaagacttggaaccaacccaaatgtccaacaatgatagactggattaagaaaatgtggcacatatacaccatggaatactatgcagccataaaaaatgatgagttcatgtcctttgtagggacatggatgaaattggaaatcatcattctcagtaaactatcgcaagaacaaaaaaccaaacaccatgtattctcactcataggtgggaattgaacaatgagaacacatggacacaggaaggggaacatcacactctggggactgttgtggggtagggggaggggggagggatagcattgggagatatacctaatgctagatgctgagttagtgggtgcagcgcaccagcatggcacatgtatacatatgtaactaacctgcacaatgtgcacatgtaccctaaaacttaaagtataataataataatataaaaaaaatttcaaagcctggttccttgcatatataaatgtctaacaagtatttgttggtgaagtgttattacagtgatgggttcatttattttcattcattgcatccttggtctgtactatgataaataacttttactgagaaaatatataaaagccaggcatggtggcttatgtctgtaatctcagcactctgggaggctgaggtgggtggatcacctgaggtcaggagtttgagaccagcctggccaatatagtgaaaccccatctctccaaaaaaaaaaaaaatcccagccacttgggaggcagaggtaggagaattgcatgagtcaagattgtgccactgcattccggcctgggtgacagagtgagactccgcctcaaaaaacaaaacaaaacaaccccagaaaatatatgaaaaatacatcttgagaaccattaccctcaatgtatagtaaatttggtattaaaattgtctcaattatttgaaatttccatttctattgtttttactctgtcatcaatttctgtctggatatgcagttacctgtagctcagaatctgactaggttatcgttaaattcaaaacccacaagaggacattatgttaacaaacctggaaaatataaatggagttttaaaagaaatatataaactaccaaaatagacttgaggaattagaaaacctgaacaaagcaataaccaaggaaagcattgaacaatattattaaacaattcgctttatgaaaggttcctgtccctgataaatattgtattaggaatgtttgcttccaaggaatgactaaagggaaaagggatttataggaaacatagagggtaatctcatagaaaacctttgcagtaagtaaggctggacttcatgtaaactgtgaagtcattaaaaagcaaatcttgttcactgtatcttttaaggtttctatggctcttgttctctgcttttctccaaatacacgttttcttagcctgtatatagttgaataatagcgacccacccgaatttacccagcatttagctccagcacttactgacatcgaattatccacagctaaatgtctcttagttcaaacgcgcaaaacacattctcattggtcaccaaatgaccagtgtgtttcctctcctcaagtgcagtgtctgcttttggtctgatgagctgtgggtggataatcagggtatgtgattgattcatagtctgtgcagaggaggttgaacctgagtgtagtttgcactggtgaatttattgacatgtctgctatagctctattgatgagtctatcctgttttcaagaatgaccgtttccaaaatatgtatattggtattgagcacaaaaaaggctaacagcctgaaaaagaaaactccagtttttgaacataaatggctccagtacatgagcataaatattcattgtctcatatatatgattgtataaacaaatactataagatcatattcattcaacaacctaccacaggcaaatagtatttaacccaagaatgcagggtgattcaatactgggaaatctattaatataataaaattaatatgctattgatattgatcaaaaagtcaaatataccatctgatgctggaaaagcagctgataaaatttaacaattcctgatacgatatttcgtacacttggtttttgtacttttttgctatttccagtaaactgaacattttttcatttttataaccagacaatatatcaaagatgtttaaaacctcttaatgcagataataaatatttttatattccaagttcctaattcacgtaacgatctcttaataagtacttttaatgaagcattccattaaagtggtctggtttttgagaattattaagaaacagaatagagtttttctttgtcccacaggagaccttgtttcaggagtgtaccttttctgatgttcaatgtgaaggatcggcagtgccttttaggaatgaataattgcttttcttcagcaggtgcctttcaaaattgttctcttcacttactctaggaattgcctgtggctgtctgaactctgactcccttctctaagctgagtcaatgctctaatcatgacctttgtgcagctctcactgatggctgatcctccacctggatgttctatttcagactcagtatgttcctccctaagcctatttcaccctctgttcaaaacaatttacagcagggcatggtggctcatgcctgtaatatgagtactttgggaggctgagacaggaggatcatttgaggccaggagcttgaaaccagactgggcaacatagtgagaccctgtgtctaccaaaaaccttaaagcctgggtaacagagagagactctgtctaaaaaaaaaaaaaaaaaaaagaattggcatactatggcccccatgaggaacaagttcagcatggcatagggaaagtgaaggagtaaagattgaaggaaaggcagaatgcagacagcttcaaatgtcaagccaacaactgcgtatataattcattcagaaatctcaagtcacaacgttttaaccaggggagtgacatacaaatccaatacagaaagagtaatctaggtgcaacgtaagtaggaaatgctgaaatgagaggaacaagatatcaggtctgcaaaatgacctagaggccggcaagagataaagacttatactggattcatgaaagtggttgataaagatttgagagatattaaaaatgtaaacaaagcaacagataacatgtgaagaatgagaaaagaaagcttgtgttgagatactgtaagttgtttttgtttgtttgtttttaaagacaaggtctcattcagtcacccaggctggagtgcagtggcacgatcgtagcgcattgcagcctgaactcctaggctcaagtgatcctcccacttcggcctcctggagtagctaggactacaggcacacaccaccacacccagctaatgcatttttatttcaaacatagcaatgccattgacttgcttttcttgcaagccacgtctgtgagcattcctctgagacatggtaatacaacggaaactataaaacagaagcaatataaaaaatagttgtgttggttatctagtttatttttaaaagtcattttcatgtttttacatttacattcatatttgcagaaaaactaaaatagtgttagtgtgaagaataagaaaagttattataaccgtaagagggagaatgttaattaaattgggagataaaggtggtgtttaagataataatttatttccccatttgcgatgacacgaaaacttatttttcttatattgagtcaaactgccaagaaatttttgcaacagactgaatgctatgataaatatctgctttttagagcctttgacggtgttgttgcttgaaaagcaagcttgaactcctcatgagatcattgtggagataaatgcttaaaagcttttcaaagtcatactcttggctctatcagaatttaatttcccactgatgatgtttatatcgattttggaacacatagtcatgaatacactaaggatagctacatcactgatgatttcccatgccttgggaatatgtccctattttatgtacatataaaatccacttatactttcttatttatatgtacttgagttaaatgctctagttttaaaactagactatgagaatgtccttgtagttgtttgaagactatggttttataacagttaaaaatattttgatgtgtatggtagtaggttttataaatgtcctatactttattggccattcaggcatacctggttagtttctgaaatgtaatcataatacaaagagagttttaaaatgtgggtttcagccattttcacagtgttgaatgctcacaacgggtatatacatttaactgtgttgaatgctcacaacaggtgtatacatcaacatagaagatcttattctaagtttgttcatgctaactttgaacttcagtttggggatcctgatagaatttactttccagagagtttatgagtattttatgagataagatgtgtaaaggacttactgcagtgcttactctttgcttactctttatattttgtttttattttttgagacaggatcttgttttgttgcccaggctggagtgcagtgacacaattactgctcactgcaacctccacctcccaggctcaagcaattctcccacttcatcctcccgagcagctggaactacaagctcacaacactacagccagttagtttttctattttagagacagggtcttgctgtgttgcccaggctgttcttgaactcctagactcaagccatcctcccaccctgacctcccaaagtgctgggattacaggcatgaaccaccatgcctggccagtgcctactctttagcataggttactcctatccccctttggccaaaaaaaaaaaaacaaaaacgaaaaacaccaaacaaaaaaagtggtttgacaaaagaatttgttaatagatgaggttttcgtctttgaattccttgtaccctggtgattagtagataggtagataaatttggtaatcatacaatcttagaactaggaagattggtctaattttttacagtgtagggattttgaaggtaggtcttaggactccttctgtgttgcatgctttccactgcccaccccaaatgtggcccttccaatgcttgctccttttcaaacagtgtctctctgaccatggttcatgcagtgagggtttagctgccttcacatctcttctgtccttagtcatccttgtctgatcagttgtagtgttactgccaggccaaaaaacagaatacagttctgccatcagtcattgtggactacaacctcatgacatctgatgcatgtgttttaacttttcggtataacataaggaacttaagtggaagctacatgattaaatagctcatgagttagttataatctttgtcaaatcatggcagataaatactataaagaattgtcagagccatgataacatatataaaagaaatactgcttttgtatgaaccttgagctgaaaatgacaattttgcttaactatatagataatttttaaaaaagtatgtcctcaactcatttcttctaaatctatccatctgaaaagcacagagaagctgctttaagactttccatgacaaactgcccaaaaaattcaactttttaaagtagagtcctaccctgagaatcttttttatgtcaaaatttttacctaagtgtaaagtttgctgaaaaggggatatttttgctgacacacagtgaaatacaaaggacatatttattcactattttaattaagctttgatactaggcaagtattataattctataaaacactttttttttcctgcagatatatcactatatgtgctttggatcagggctgtactaggttccttaatttaagacttaaagccattgtataaattgtttcctctgacaattctgtatttcttttgtatatattattgtttcaatattttatggtgaatttctcctaatactctatcccaattgagagaattgttgagttattctgtaaattatcttcattagctttttgcaaatcagagactgtatagtataaaagtcactactataatactattttcaattagcatttactatattctaaatttttatgtattagatcctacttaaagaaaattttaagttttaatccttttcggtgtgaagacagctatgtagaaaaggcaggctctatttgggtacaagaaaatctgcctcttaaaagtattttccatttcatttgcttcatttgtgtgtccaatatcttagaggcatctaaattattaagagtgccacccagaaagacaaacattgcatgttctcacttatttatagaatctaaaaatcaaaagaattgagctcatggacatagagagtagaaggatggttaccagagactggaaagggtagtgggggtggtggtggggaggtaggaactgttaaagggtaaaaaaaaaaaaaatagaatgaacgaaacctactatttgatagcaacagggtgactgtcaataataacttaattgtatattttaaaataatgcaaagagtgtagttggatgtttgtaactcaaacgataaatgcttgaggggatggatgccccattctccatgatgtgattattatgcattgtatgcctggatcaaaacatttcatgtaccccataaatatatatacctactgtgtacccaaaaaattaaaaattaaaaaaaagagtgccacaaacacaaattttatgatctcagtgtctggtgatcagtacaaaaagtgtagcacaaataagtttgaaatcttaccatttagaatgagtacatcaacatacaggtaaggaacagaatagcagcagggcataactgtataccttgaaatgcccatttaaaaatgtggaagattagcctcaggttgattggcatttcttggtccatttaacattagatataggcttttgttgttactcacagtgctgtgtggcgctggctgctatcagcttaccagagcagagtgtgttcatctcttcccgactccatgattatgctgcagagcagagattgttttttaattaaaaatttatttcttaattaaaaaatataaaccctgagagagttgattgttaaacatttgccagctcactactgctcataaatgtgccatttaatgaatgaaaagcaggaaaagctcctcaaattaggttcctgctagatcaaggatcctcataatgctttcattatggcctgcctttcctgttgcttctaacgcccatgggggcttgttttcactgatcacagggaccagattgtctccataccacaaggactactcttcctttatataagcatccgtaatgacaattcctttgaagttggaaattgaaggagatgagagaaagtaatatcactaccagaaaggaataaaaagcatccatccattcaatgttctactgccctatggcctagcagatttggaagtagtaagtagtaagatctaggtatgaatctcttactgtgagaacttgggcaagttatcagtctaaatcctagtgacctcatctgtgaaatgggtgtctgaagatcacatgggttactgtatataaagctcacagcacagtgcttggcatgcagtgatcatcctttggtaccttttctcggtacctggtataggtcagtggagagttcaagaacttcgaagacttcatggctgcctcccatcatttttatatggagttcctctttcccaaaaaatgtcagcatagcttggatgaggtataacacaaataaaatttaagaccttgaatatcattctgcacaacagtatttttagattcgaagcacttcattgcatttggatattattcaagattccagcagttttaaagtaccaattgtgctggctctgtcagggcaagagatgaatttgctgggagcagaaatcagaaatactgtgtttttcctcactgatgaaggtcttttctgttgaacacttgaaaatttttaaatttcttttaaaataggaaaatctcgtttcagtgaaacttaggttcttttcatgagatgccaacctctttattaaaaatctcatatacttcctggtgacattacttcacaatattgtttaaaaggacttacctagccaatgtgatgaacgaatggtttgcttaaattcggttatctgaggtaaaaatgggagtatcgatggaagatatttcactatttggactttttgctatttagatagagaattatcgaatgtttattattcagtcatataagtatgtatcagacagaaaattagagggtgaatatcctgaaaactagtgggactttacgtcatttcattaatgaaacaagatagcattttgaaaatacacctttggtaaacttaattaaaacataattttaaaaattaattcattatttataataaaaatttaaacccttaataaaatacatttccacactgaagacttatttagacaggtctggaaattaaaatcaggttgtagactttattgcttgcttattaagaccctgagatcattatcttaaatgtaattttaaaggttttttccatgcttaaggtatatatgatcaaattgaaaaatagccaattatttccagtcttatagcattactatagagctatactgtccaacatggtcaccactatctacatctgaccattgaacacttaaaatgtggctagttggaattgagttgtgctgtaactgtgaagttcaaatacacaggattttaaagacttagtaggaaaaaatataacatgtctcattgtagtgcgtagtatgaagtagataatcatagatatttcataaatgaatgtatgattgaaataggagagaaagttagagatttttgttggttttgttcgttgactggagagattaacatgaggcctggcccatagaatgcacacgagaaacatttgtgaacttattaacaagtaaaatttgttgaattatatttgttataattcattcatgtccatcttcattcattggtataacaaatgagtgaatgattgaatgaacatagacacacccacacccccaacacacaccctcacacaaataataaagaagataaagtcctcagagagaaatcaccccaatatacgttaaactagttctcactcttcagagagtaccagttattttaaagcatcattaacttcatagctgttttaatgatatatttactttaattataattttattttgatattatcttatagtttaagttaaacatggaaaagctccatggaaataattggaataaggctcataaattagtgttttaaaagtgccaaacttctgagcatcagtagtattgttttccctggcttaaagtgggatgaaatcatgatttcaggaagaaggattcctcagtgaacataggtgttagtaacttgatgcttaaggtttgagaaggaacattgacatcacttgtttagtaaataatagaaaaaagaggtgcattttaataataaagctgtaattatagaaatgtaaaagtgtgaaatgtataaacacatttaacataaattttatttcagggtctacataatacgaatgaatttcccttaaatatttttcttccaaagattcataaatctggaaacactttcttcactaagaattttcataaagtccacatacacaaagagtattctgaagggcaaacaataacctgaagaaggaaaaattatgttcaaggcacataaagggaatagagaagctgtggtagtgctgcttccacagttaattgactaggaattgttataactgcaaaggcttcatggttcaaactgacttcagctttttgtgttaggataagtgatttctatacatttccgtcatgtagctctcccctgacatcctggaggctgaagggtcctcagctcctctccttccctcatctctgtcctattgtattgctccagtgacatagaacttttggttctttcaactcttgtctctgggtctttgcaaatgctctttggatgccttatcatcattttgactaattccattttcagtatccttttctaggggagatctggtcatttattggtgacatggtttggctttgtgtccccacccaaatctcagctccaattgtaatccgtatgtgttgagggaaggaggtgattggatcatgggggcagtttcccacatgctgctgttgtgacagtgagtgagttctcatgagatctgatggttttataaggcagttttccctgctcttgctggctctctcttgcctgccaccatgtaagaagtgcctgctttcccttctgccatgattgtatgtttcctgaggcctccccagccatgcaaaactgtgagtcaattaaacctcttttatttataaattacccagtctcgggtatgtttttatagcaatgtgaaaatgggctaatacacttggtttctgctaaatcttcttgctatgggcttatataaatctcctattcccttttaggagcactatattacactttctccaaaaagtgccaaatcatctagtttttcatgtgtttgtgtaagttatagttctaatggttgtttgcaatatgctctacaacccccaaaaccctttcctttgtttccttgaatgtaaaaacttcttcattatttccccattttaatgtgtgatatttttcctcctagaaacatgacaaaaacagcttttctccataaattactaggaaactatttacattgctgtgttttcataaaattcataaatcacataaacaggacatgttacgaattaattggtagatcatctatctctgaatgggttaaagaattgccaagagtgatcaagcctgctctctttctggctcttgatacggtgttgacagccaagcaaagagcttcttcaataaatccactctcatattcaagtttttccagatgtgagaagtaattaagtcattgcatttactgaagccttttatgcttttcaagcaagaacttgcggctgtggtgagttaactctgcttgttacatgtgtgtgtgttgcatgtgtgaatgtacatatgtacaagcacacatgtgacatttgccagtagtcaaatgagaccccacctgaaaataaaacaaaaccaaaagctgatatcaataaatgctagaaatttttacagctaaatttcacaattgagaggtgggctttctccagtaatgccttttttctttctatttttcctgaatgttaaagaaatgagggtaatcaaatcacttgcatcattaaagaattttttaagtggtaaagtcatgactctcataaaacataaacacgtttcaaagatttttaactcattaataaatgagggtacccataagaccttacagttggttcaaaggtgaatctgaagaaccacatataaatgcatagtaaggaatgctgaaatgcatttacaaataggtgcaaaaagggtctgtctcatggacagtactcaattgccttcccaagaacacagctacagtaatgctcccttatctatggttttcctttctgaggtttcagttactaaggtctggaaataggtcagtacagcagaagatactttgagagagaaagagaacacatgcacataacttttattatagcattttgttataattattctattttattactagttgttctcttgctatgacatcttaaaatttatttttatttcgatggtttttgggggtacaagtggtttttggttatatggatgaattttatcatgttgatgtctgagattttagtgcacttgtcacttgagtagtgtaattgttcccaatccgtagattttaatcccttacccttctcccttctgagtctccattggccgttacagtactctatgtgcctttgcataccagtagcttagctgccacttatgagtgacagacaacatgcagtatttggtttttcattcctgagttacttcacttagaataatggcctccatctccatcccagttgctacaaaatacgttattttgttctttttctgcctgagttgtattccgtggtgtatgcataccacattttctttatccagttattggttgatgtccagtgagtctggttccgtatccttgccattgcgaattgtgctgtgagaaacataacacatgcagatgtctttttgatataaggacttcttttcttttgggtagatacccagtagtgggattgctgaatcctatggtagctctacttttagttctttaaaaaagcttcatattgtctcccgtagaggttttactcatttacattcccaccagcagtgtataagtgttcccttttcaccacattcacaccaatatctattgttttttgactttttagtaatagccattctgaccagggtaaggccgtatcttattgtggttttaatttgcatttatctgatgattagtgatattgagcatttttttcatatgtgagccatttgtatatcttcttttgagaaatgtcttttcatgccattactatcctagtttataaattaaactttatcataggtatgtatgtataggaaaaacataatatgtatagagtttgatactatctgcactttcaggcttctattggggggcttggaacacatcctctatggataaggtctgggggctactataatttgcatttctatggataagaatcattctcattcttatcagttttcaacagtttatggaatcgtgaagtagttcaaagataatgaaagaacagtatagtcctgaagggaacactcagtaatttgttttctatgtgcccatttcaaagtctttcacaattattcctgacacatctcacataaaactctaggaaagggacactctgtgggagtcaagctgtttgatcctgcctgaccctttggttctgggtataagccacatacagaccaagaagagcttaggtttcttcctcttggtggtgaagattgcgggagtgatcatggtattagcttaattgctatgaaaactgaactaatgtctcaagctgtaaatgaaaccgaagactttcagctcaatgggcgctatgttaatgtagacattgagaatactttcctgccccctctataagcagagtacatcgttttaatttgggcttccccaccacacccaacctggaaattgttgtgccccatactatttccagtttcttgtttttcacttcctccaacatccatctaactatgtagctctcatttgtgagtgggatctacatctgtgaaaaggggaatatacatatggaatataccttattaaatttttttttttttgagacagtgtctttgctctgttgcccaggctggagtgcagtggtgcgatcttggctcactgcaagctctgcctcccaggttcacgccattctcctgcctcagcctcccgagtagctgggactacaggcacccgccaccatgcccagctaattttttgtattttgtttagtagagacggggtttcacagtgttagccaggatgatctcgatctcctgacctcatgatccgcctgtctcggtctcccaaagtgctgggattacaagcgtgagccaccgcgcccggccaccttattaaatcttaatagcatacttggtcatggtgacacatgtttaggttgctttgtgttctttcgatttctgattattaaagagtaatgaaatagctattaaaaaggagaaaatatgttcatgaattctaaattgtaaaagttgattggaccaatattaagcaaaactcttctcttttataaaggagacaaattgtcctagagtgcttacatttcttctttcaagaaatgatttatcttgcctcgtccatcagtaaagttctgttctgggaagataccagttactgagtaaataggtgaggcaaagatggaatgactagggattcaactgagaagcaggaaccttccggaagacggtcatcaaaacaaaaaccaggcaacaaaaaatgagtgtgaaaaaaccatcatggcagggaaacaaatcaggcaaacaaattcttctttcacctaaccatttggaatgaatattttataataagaaatgttgaattcatttttaaagttaaaagaaaagcagtttatctctgtacttttttccccccactcagaactgaatttggatctgttttaattgtttattataaatttttatttttaaatcatgtatcaccatgttgaggaaaagtacatgttctatcattatgaaaaaaaggagaaaaaagtgaaataagtgtgaaacagtcaaaaaccaagaaagtcttgtcataggcgacctcaaggaaggtgaagacagttgtgcactgcacgactccagatggtggcacagatacgttcccttggccacggctgtgtctctgagacttgaattacccacctgacagttgctaaggaaatacatttgcttacgtgtaaacatcaagctatcaaaagatcagaagacttctgaattataaataagcaagtgagctcttatctttaagctgtctagttgcagaaggcccttcttgactttaaaaggatattaatggcacagagaatgagaagaccttttcatgccaaatgtttttcacatcactgtgtacctttattggtggttgaaaaaaagcttgtgtttgtgaggggctccactatttttaaggtgctttttctttttattttttttaagagggagtctcgctctgtcacccaggctggagtgcagtggcgcgatcttggctcactgcaacctccgcctcccgggtcaagtgattctcctgcctcggcctcctgagtagctgagattacaggtgtgtgccaccatgcccggctaatttttttcttttttctttttttttcgggatggagtctcactctgtcacctaggctggagtgcagtggcaggatcttggctcactgcaacctacgcctcccaagttcaagcgattcttctgtctcagcctccctagtagctgggattacaggcgtaatcccatctactgccatcacactcggctaattttttttttttttttgtattttagtagagatggggtttcaccatgttgcctaggctggtctcgaactcctgagctcaagcaatccacctgccttggcctcccgaagtgctaggattacaggcgtgaaccaccgcacccagcccatgcccggctaatttttctatttttactagagacggggtttgaccatgttggtcaggctggtctcgaactcctgaccttgtgatctgcctgcctcagcctcccaaagtgctgggattacaggcgtgtgccactgcgcacccagccagtgctttctttttattaacttctgtcaactcagtttttctgtttaactatgaagaattagaggtagtgaggggttgaataatttgccctagaggacatggcagagccagacctggactttgagagtttagccataagtgatgtctcttggtctcattctgtatcaaggcatgcgtagagtactaaagtagaaaagtaaacaacataaaagaagtgcccaataagtaaaagctatgagcagctacagagattttgccttttggagcaacccaaggtgaaaatatctattaaaatacattaagcttggtttttggaaaagtcgataggggattttgaaacatgatagctgtccatgaggaacactttcttcatattctccatgtcatattttagagctactgacaagaaaactttgctgtgatgaagtgcagggcttaacacttttttagagaaaactttgcatgaattttatattataggtgagaggaaaaaagatgtattcaatcaaaagtaatggtgtctctagcttgccaaacgatccattaaagacttcatccagcaagtgttgagtgatgagtattttatttccaattctatcttagtatgaagaatattttattcaccattctatctctaacaccaagcacagtgcctggcataacaacatttatttgttgaacaaatgaacacaggtctctagttaggttctgatcctagtgcttcattgaatggctttgtaaatgagacacataatttttcatagccttcattttgtcatctgtgaaagagagggctttaggtgtattgatttcttaaggatccctttggcttgaaattctgattctagaatctcaaatggaaaatttgtgttcacattgcacgtggtgtttggtttttgttttcaaaagtttgtgcattaaatctcaacagcttattttcttgcagcacagtgaagagtccctaagaacatattacgtgatgggaaatgagaaataactgcactgcaagcctgatgaaggtaattcaccttggggaataggtgtcaccctgagtaacaccagtactgtctcctcaaatatgagccaaaaggtgtgtctcaggcagttttggcaagattttctccctacactcctagaaatttgcaagacaagtttacagaaattactcctccctatttccaaataaagataatgtaatagatctatagaatattagaatagtcttctggccagcagaggacttgagggaaataattggaatgcacacattctttccttttacggaacaaataaaatatacaaggaatgtccttgtggaatccactacactgggccagcatgatatggctgtaatcttagagttgtggtttccaagttcagcatgcttgaggcaatttctttttggtattttgttggtgaacaggatatgtgataccattaatttagcctgtatcaaaaactagttcaagaccaacagctccttctagaacacaacattttaggagaatagagcaatgtttccctaagcagtcggtcatatttcacagaggagtgttagttttctggggtagtgggtatgattaaaaaaaagataggtagataggtaggtaggtagattagattaaattggattagatttgatgagataaacaggtttgtgttcaggggaacacgaggttaagcaagcctaagcaggttttttggttgaaggtcttctcagaacttctagtatgtcaatatgccttgtagatctctaagtggcagggacagagactggggtacagatttcccaaacatatttgtttaagaaacctgcttttttcccccagaatcttttgtggaacttttgcctcatggaacacaatttcagaaataatttatacgtgatgactgtgtagaatgtttttcttgtcaggattttcagtttaggtaaggccaaggcattttttttttacagtacattgaaaactagatatgatatcaagagaaaaaattatgcttggctacttagaatgacatactatttttaataaatttgtattttgtatcatcagtattactattcagtgtagggtattttttatgcccaatgctaatgtgctatgacttggtaaaattaatttaccctaggatttacataaccagattaataaattgtgagttgtagggagtcttggaattgcctgaattgacattaaaatatttgttttgagaaatttttttttaaccttggttttacgtaaccaaggacatacactacattataaatattgtgatggtttatttttccaaacttttctgaatgtggggtgcccattgagtaataatgcaaatcaccaatgactttgtaaaaattgacatgatgagtagaactgcagaattcaaagatgatgatgatgatttttgaaacgatgtttccagaattgttaaattatgtatcaacatatgttaactgcaacttctcatgtttaatgatgtttacaattaatacaataccatactcgccagtataatactaacagtcataattaactcagaatagattctttgaagtggttcaaagggcttttcataataaataagtagcctctaatcagctaatataaagtgggtattttttaggatgtgagaagtactggtatgtctgataaaacatataatttaggttgacaaaatgagtttgaatgatccagattcactaccccaagtcagaaggaagtctgacattccagtgaaagctttatttagacagagacaaggaatctttgagataacaggctttggactgtgctatcttgagtgttagagctgagtagttttcccagaatctctaagtcctttttatgctcttttatgaatgaatagaattagtaaaagataaataaattttttcttttggatttcttaaccagtggaaaaaatgttgactttaaaagttcataaaatcaaattttgcttaagaatatgttatttccacttgtgaggccagcctggtagacctctgggatccttttctgttcactcacacaccactgagataaggagtgaagtgtgggctaaatagggctgaggcttgggcaagggcatttctgccagagcaccagagacgtcagcatctcaagggcactgtggtatggaaaaggacgccacatgagtaaattttaaaaatataaatattttaaagggtaaaaatgagggtccctgtatttgaggatataaaagatgaaactgaagaagaaaagataggggaagaagaaaatgaagaagaccaggtgagtgagaaaacacatactcagaccagcgtttgttcctctaaattgacaatgagaaaaatgttctttctgttcttttcttttttttcaaataggtcttctataagcctgttattgaagacttaagcatggaattggccagaaaatgcacggaactcattagcgatgtaagtggctggagtaatttttgtcttattttgcattgcacctgtggtattattatgttatagagtcatagagctgtgggggaaaccctgaaatcaccttttaaaacacagtcactttccagatcatggaacaaagtcctgaaattttcagtgatttccccaaggtcacctatacagagaatttctgctagagcaagtctcctcattcttaatccagaatcctgtcccttatgagttttgctgtcacgctggcatgaaatcataaggcattgaattgcagtatttattccatttgagaacccccaaagattttaaaatgaatataatgatgtaatttgtcttgggaggccctctatctaaatgaatagtcatttttttaacattttggggccttctgaacaatctaatgaatggacttgtcttccagaacaggaaaatgcatatatatatatatatatatatatatatatatatgcatataatatttatttacaattcaggatttgttgattactgacctgcttgctaagaaccctgatattagtgcaaggatattagtgcaaggggtatttttgttgtgacattttttagtaactgggattggttgatattacactttaagggaatcccagaattattgaatgattgaacatataattttatgttaaatatgtaagctagaattcaagaagtacaaggaaaaatgttgctcaccagggatgagaatttagatgatcctcattagcggttctaagaggattgctggtccagagaaagggtaactcctgtaaagtgaatatgtgcctgtgtcttcatttagagagatgagcacaatactggttgtttctgttgttgataataagcaaaatgatcagaatgttttgcacgtttgttttctaacggaagtcagtcctgggcaggagggtagtggtctggcacatcctccaaagtcaacctgcctgggttgactccccagtaaccttgggaaggttatggaacctggcttggctccatccctcagctgtaacatttataataagattaaataatggtaatgcatataaatgctgaataaactatctggaacattgtgagtactccataaatgttagctgttattaactactctgtctgttacttccttttacatccatccaatcacaatttagatatgactggctctttctgacaaaccagaaggcaagcacaaaggatgctggtggaaatcataccctttcccatatacttgacatgtgatgtaattaccctttaaattaagtatttctttgtgctattacttaatagtcattagctattgtatgtgaaagttctctgtaaattgcagtaataataagtgacaatgacaacaacaacaacaataacactattggcaacagttaagatttagtgactattgtgtgccagggattgcagcttgcgaggtaggcgctaggctttttctcatttctgaagcgaggagatagaggcacagagaggttcagtaccttgcctgggtcacacagttaagcagaggcagtaatagttgaacacagaggcctccctctttacactgccaagttatctctccctgtagatttccatgaaatgttgttcttcgccttattattattatgttactattattagtagtaatgctaccaactaaaaccctgagttcctaacctcttccagctttgatatatttttattgaagtgcaattatagctgagctaacttgtgttacataaaccatcaggactaaagtggtaactgtagttagtaggtgatttggttggagttgttttggataagattgtctatcagtgactttaaaaccaacatgttgtgaggggtggtggcctttatcattatgcaaaagctaaatccatacatttcacacccacgtaggtaaaatgaaacagataggcatactttctgtttattacagatttttgtggcatggtagaatgtactacttaaatttaggacatgattattctgccttaatttttttttttttttttttttttagacagagtctcgctctatcacccaggctggagggcagtggcacgatctcggctcactgcaagctccgcctcctgggttcacgccattctcctgcctcagccacccgagtagccgggaccacaggcgcctgccactaagcccggctaatttttttgtatttttttttttttttttttagtagagacggggtttcaccgtgttagttaggatggactcgatctccagacctcgtgatctgcccgcctcggcctcccaaagtgctgggattacaggcgtgagccaccatgcccggcctattctggcttaatttatatctgtatacacattcacattttgcttccgaatagaattctatacttgctaagatacttatttaatttttagatttttttcctttttctcttcttttctttcttcctttttttccttccttccttcttcttttttatttttctggacagagtctcactctgttgcccaggctggagttctgtcatgtgactgcagctcactgcagtctcaatttcctgggctcaagtgattctccagccttagccttccaagtggctaggactacaggtgtgtgctaccatgcctggctaattttcattttctttttcgtagagatggagtctcactatgttgcccaggctggtctcaagctcttggctttaagtgattctcctgcatcgttctcccagagtgctgggattacaggtgtgagccaccgggctggccctgcttcgtttctgtagatgagagggatggtttcatggacttctcttcatggtgcagcctaattgttactctttggacttcttccagctttcatatatccttaataaccaatatgtaataatcagaactgtgcagagtggtacagatgtggacggtctagatcacgtgtagagcaggatgatgttttgcttagcttctagcaccctttatgatgctatgaagagtttcttagacttgggagctgcagaaagctgttagatcagcttgataatctgtagaccatcagagccatttcattcctaatttctgacctgtagctgatagcttaggacccatcatctttaaataatagtttgaattattttaaccacactagggctagatctaatctgtagttttctgccctcttgcctggccctttgagaacttctgaagttcatctcagtttgccgtttcccttactgagacagcttggagtcagcagacctgtagacactgctatatcatccccttgtcagacaattttatagaaatgttaagcaagattggcctagagatcagccctaggaagcctgcactgcttagaattctccatagagagaaatgtccgtttttcaggtcaagtggcttcactttgggcatcagtataaggcatttttctttctttctctttctccccccacctagtttctgctttgcacttgctctacccacattatggggttcctctttgcacaactcacttcccagtcttgaagaacagctggtcttctgaggcagcctcttttatttttctgttaatcacataatactattattttctcagatatattttcacagatattctctctgtcatatttattcctgttagtctaacctaacattatctaatcaatcccttgaataagttaaacctatcctctctattgagcattcagaatcctggatctagtagtcttctgatggggagtcataaaaaagattgggcaaaagggaatcttttgtatgtttcttgtagattaggcagaaagagccttctgcagagcaggtggaccacatctgcatgcagcctctcagtgtttagttcaaggctgtttagggtgttcatctgcatggcagcaggaagaatattttccaggcaaatgaacgttgttgtgggtaaatcctttcaatgccaaaaacattaaattctgtggttactcctccagagaaagcttagatggtatcagaaaacctgggagagtgatcttagctatgtccagcccagttaaataatgatggagccattgtttttccttccagggtgtattgaatttaacttgtatgatttcacttgtgaagagcctttccagatactttcagttaagaattcttgtgaaaggaaagatccgcaaacatctccatgtctgtcatccgatttcagcctttagctaatctcatactcattcaaacaaacttggccaggaggaggaagcgaccctgcactaaattcatcctaattgtaatggagacgtgggatttgtgggtgagggcaaaagagaaggtcaatgtttgggacatcttaatgatcataaagtcatcaattttgccctttttgtcttttggtgttgggttgtgtattcggtaggagtgcagatgactgtaaaaacaggaaaactctaacacaatggcttaacaagtaggtttttgtttccccagcctccacatataaagcccggaggtaggtagttcaggctgggtactatgggtgttatcagtctcccaggctcctttccttctattctgtcgtcattagtatggtggcttattccttggtaatgacatcattgctgctgccttccctttgattgagaaagaaaaatgtggaagacagaatgtcacagggttgtgcagcatctctccctttgtaccagaaacactagaagcacttctgggaagatttccactaaagtcacagagagtgtggctccccaggccaaacactggatggcatgaccatgcctggtttagatcagcttgtcctctggggctgggcaggagcctggctgctctcattaatccatctgggctcttttaataggagataatgggagtggccagtctatccaatagatggtgtcaacccgaaattgtaagatgtagacatggctgtaataaaatatagcaatctattcagtgatttttattttacctaagatttgtttcattgaccaatatagttccctttcaatgatcatttcctgttatcttggtgtaggaaggctactaatatgtatctaatatttatataaatattccttatgtatttaaaaatctaacattctttgcttattgtcattcatattgcacaattcacttgaaatcacacatgattgtgtgtgacttctaacaaattgtacaatttctcttgaattgtacaattgtaaaggatcttaaattttaaatacaccttcatttaaaatatacaaatatgtgtatctttttaataaagacccaagaaaaaaaaatagagtctacaattaagactgagctatttgtctgcctaacagaagaagtaaatacctcacccttatccagtcctcctgtcctgaacgttctgcatgtgtcagactttatcaggaggctgtagccacaagcacataccactgcagtgaagaatgtgaatgtgatggggaatagatggtggcaaaagataaaaataatgagtcaaacttaagcctaatgataggctattttctctcacacttaattatataacggagatacttttttctccatatgatcaaaatagcctactatttatcatactgccattaacagtttaattactagtggctgaggagggtgatttgcaggaacctaaaattatggctaatctctgagaagaaaaaaaagtaatttagtgctcagataagataaatatgttctcgtgttgatttcatgaataaagcaaatgtttaatgtggtaggcatctgatatccaagagtcacagcagtgaaatatgggattttgaaataacttcacttaatctgtatctagttctaccacaggttaagtaatgcccgtcaaatcaggcttgcatatgggaaaatctccatgtaccattagtgtataacatcaatattattcacatcctctaagaaccaggtagtatatacaattcagctccacttttgggttataattagggagaacatataatttatcatctgaaacaggaacactttttcagtttaagtatttatggtcttgggaggataaacacgagcatattacagagtgatacaacttttagcaaattacctgcatcttctcaatgagtcatagttttgccttcccagtttccagattgtgcagcaattagtgtgacagtgtgattatactttaggtccttctccacatttcctgacttcttttgggctcaaatatccacccgggtcttcccccggcataacaattctggcctatccccaaaggggaagagagtgagtcatttgacttgtgagttgcagagaagagatgagcaggtttagctaagcctcactgggctttgtcttgctgatctccagcaagaaggccttctggaatgatctccaccacatagcaagctttctgggcaggttcagttcttctctgcgctcaggaggaggattgggaagcctatgggtgctcataaattgggaggaattagtaacaggaagcccacgttggccacaatttaagcctcttcctctaatcaagcatgtctaggtaataacggtaatagtgatccccatttaatttcgcctctacttcttaattggtcacatctgtcatgctgactacttattttctaccttgaggtaggcagctgtgtttctgtttggccaaaggcttatgtgtcaaggcttaaaagcaacaaaacaccaggacacttgtaggagcgagatggcacatgcttgctaattgcactgggctggctgggtaaacaggacccatcacccgtagccagcacgcctggtgttgatgcttaactggaccctcgcttatctaaagaatggtctttcctcactatgcctcatcatctttgcaatcctgtgctggatagccgtttatttaacttggcttgttttgaggtccctttcacacttgagtatttacttcagtaaatggactttatcaacctaattatcattcaaaaaaggccattagaattgtttttctttttctcttcttatgtaaatcattctcttttttagatccgttataaagaagagtttaaaaagtccaaggataagtgtacatttgtgactgacagtcctatgctaaaccatgtaaaaaatatcggtgcttttatttctgaggtaaggtatcaaaagcttgcaaactggcttgcatttatctttttcttattatatagatgaaagtctgtgcattaaagagatgaagaataatattttcaaaagcactactgaatgttagtaatagctacataattatctaatgtgatgcgctgtcatttaactcatatagattgacagattttactatgtatgcttcatacattttattatatatgtctatattttgactctaaatctttcttatttatatacgattcctcttgaaaaggcatctttttattaaataagtaaaagcactggcacaatagttcactttagaagttccattattttgtttcctaatagatatatcagagataaatgattgaatatcattttggaaataaataagatttaccagttttctaaaatgtgatatctttgataaataattttaaatgtatttaaactattttggagtaggataaagttcagttcaacagtgatacctattataaaatcacagactgaggaatacgctatattcattttccagctgaaaaattatgtagtttctttctgagagcatttagaactacagtttatgttgcattgtaaagcacaatgttaacgatgatgatttctgtggtgaggcattactgtagtctgtgaatagatcacttagaagagatacgtttgaaaagaaacggaaatgaaatagtgttgtaaatgactgacctctagtgtttcataaattatgttggaaaaagatcaactggatgtccttgggattatttctgctaatgcgaaacaattttgaatgaaatcagtacgttttctttcattaagtaccaaaatccaaagagtgtggtagcagaaggctagcacaggatctgtgctcaataaatcaatactgaaatctagctctgagcaggaagaacatcaggaactcatctgcagataatggaagaacatagtttgtttgtcttagctatgttccattctcccgtgcagataaatacttgatgttctcaattattgattatgtttcctgaaggagttaattgcagagcaaaatattggaagtgagcaatctattgtgttcccttgaaccttagttttcccaagaggaaagagtgtttgtctttagagtagtgactgagatggcttaaagacagtgcaggctagaggtgggtaggcacataaacaacaaaaaagcactcactcccctctccccctggagcaggaggaggctgagaagacctgaataaaagaacactgtcctttgtcaagttctagatagtagattctaacgacttgcattttctggaacaactcgaattgtttgctcactcatccagcatgaaactgtcaatatacacaaatagatttacttttagaaatgtgcttgcatttaaatagaaagccattatgtccttgcatgtctcattgaaagcgttctctatgataaattggatttatttctatctcttcagaatcctggagtttgtcagctctggtatctaaaattaaaatggtctgcagattttaaaatcaattctgttttgggagaaagtttcttcttttctacttataatcacagtttaaaaaaatggaagtttatttatttatttttttcctgtttttttttcccccaggcaaaatacaaaggcaccattaaagctgacctttctaattctctttataagcggatgccagccacaattgacagtgtttttgcaggagaagttacacagctccagagtgaggtagggtttttctaaagtgtttcatgattttgtagataaaacatataactggaaaaaagctacttagcgttttaataaaacgttttcatcatgggtgttaaataccaaatgaaagttgaaagcaactgattaatgtgctgtcagtagttgctgttgaaattgcagaaaatgaaaaggacacgcaggtttatgtcagtcacatggtactgttttctgagtcccattcaatgcaatttatagagcaaatcttaatctcatttagacagcttacatggatgaaattcttatagtaaatattaaactgttctctaatttgatatatgatccctaagtagagaatatttgaatagcttgttaaaagccacataaagagataatggggctggacactctggctcaggcctgtaatcccagtacttcaggaggccaaggtgggcagaatgcttgagctcaggagttgaagacaagcctgggcaacatggcaaaagctggtctctaccaaaaatacaaaaattagccgtttgttggcatgcacctgtggtgccagctactcaggaggctgaggtgggaggattgcttgagcctgggaagttgaggctgcagcgaaccaagatcatgccactgcactccaactagagcaacagagtgagcctctgtctcaaaaaaaaaaaaaaaaaaaaaaaaaggttgaattcaggatccacagatctgcttcatcaattagacaagtgtttcctgaatttccttttctgtagattgtgtttttcctttaggatatctcaggctaccaaaaatagcccccatcaggtggaagttactatttggtgattgccagttgcagaggaacttaagaattgtcatcaggtaaactcattttgaatccagaagggtttaggagtaattttctctttgtagcatatcaacacataaggcattcttaatctattgcatttcctaaaacagactttctaaatggaatgtttcacctctttctggttcatcttaatgttgtgttttcttcacagaacaatcaaatttggggaggttattttgttaatctattctttagctctctcagctacgtgagagcagggacctcatctgtctcgttccttgctctggtcttgtgctcggaagagttcctggcacatagagagtgctcagtaaaaacttgtaaaatggattttgtggaattttaaaattttctttctaaggatatgcttccttttacatagtttgtattcttcatttcacattttaggttaataatagtaaacacacagaagttgttctatgcatttcacgtgtatttatcccagtcagtcctcaaaacaacccaatgagctgtccccagattagagttgtggagaccgaagcactgagaggttaagtcagttggccaaggtggcacagccagtaaatggcagcgccggcacatgaatatgggcagtctggccccagagtctaggtttttaaccacacactatgctatatttttcctaccatttctaaccctctttttcttgttaagcaagcagtttacttctttccccagaatttctttttttaagatggagtcttgcttggtcacccaggctggaatgcagtggcttgatctcagctcactgcaacctctgcctcccgggttcaagttattctcatgcctcagcctcctgagtagctggcattacaggcgcacaccaccacacccagctaatttttgtatttttttttttagtagagacggggtctcgccatgttggccaggctggtcttgaactcctgacctcaggcgatctgcccacctcagactcccaaagtgcagggattacaggtgtgagccattgcgccctacctttccccagaatctttttaagtagagatacctagataatcttattaaaaaaaattttttttaagttctggggtacatgtgcaggatgcgcagatttgttacataggtaaacgtgtgccatggtgatttgctgcacctatttaatatgaacccgtcccctaggtattaagcccagcatgcattagctatttttaagtagtctgaaaatacattactcttgaaaaatgctgagcatagttattctttgcagaacacctttaagtgtttcactattacacatttaaatgtccactgtgtacctgacttggcagtaaactaatctcggttatgcaacatgcagcttaaaatatatgatgtcaacgttctgcatgggtgactgtgactaatatgccctttatttttcctgccaatatctggccacctaagcacttgctgataatgtgggtcactttaaaaagcagataattacaacccaacacttgatatgtgacaagcaacaattaagcaataacgaaagaaaaggaaaacaatctattattgcttttatacttccttgggaaggtaacttttccgatgtttccatcctcatttctttgaaagcacacaacagctctcaacttcttatagcataaatagggctgtaatacacaaatccctgcaacatagaacttaacatgaaaaataatccaggttgtatattttggaatctatcatttgttttgtcagaataggttcccactgacattgttagcatgttatcctatactgaaatagacaccactgggaaaggtgcatatgtactcacaattagcattgatttccattgttgtaattagtcactgaacttattaataaagaaaaacctagactttgaataaggcggctacttcaaagatttatgtaactgtcataacatttctttagatttacgtacatcgattttattattgttaaaattgtgattcttagagtttacctaataagcggggcaagaaagtagaagaactatttgacagtatctatgataattaaaggactaacatttacagtgtccaaatagtatcagatttgtgatgtcctaactcggagtattggatgaattcagaaatttaatgacattctgggttctaatgaaaagtctctttaacttttgacaaattattaaaacaaacttatcttaaagtcaatttgcaaacactctcagatgcttaaattcaaactagaatgataaagttagctagatgaacacttacagaaaatgcctgaaaggaagaaatgccagaaaaagagagagagatgtagagtttttaggaggccattttattagctatcccctgttaacaattttataagcacagattacaaagaaagcttctgaaaatgaactggaccatgccatgaggtggcgagatccttctcattagggctgtttcaggcaaaggctaaataatgccttatcatagaagcaattcacgctactcaggcattggaactgcagcttaatgagagtctatgtttcatccacggtggtcacaggattctgtttcagaagtccagaggtgtctatgctatggggttaacagcacatttacctgtgtcatataaaatataatgtaagttatgttattattctgatcgtctttgtagcatcttatgctatgttgttagacactataaataaccatcaagtagaattaaggtgccagataaatcatacttttcagaggcaaagccattattttaatttgcatacttgacctccttggccagtaaactttaatttagagatctatgaattttctgaaagcgagggcagggagaagcttcagggcatctgtgaaacccccaatttcaatgccacatttggccagatgctgtggctcgtgcctgtaatcccagaactttggaaggccgaggtgggcagatctcttgagcccgggagttgaagaccagcctgggcaacatagtgagactccatctctaaaataaatgaataaataagtaaatgccaaaaaaatctataagtgaaacataaatgtacattttatctgtatacatatgaaatataaaatatgctgtaagatcaaaaatatagaataaatgtatttatcacttatataaacaaagtgtatatgactattgcaagtggactcctgtctccaggttcctagtaacatggcaatctcagttctcaaagtatgaagaaaacagcattaatctagggaaataccatacaataatgacaaatcctaagaaatcaaatttatcggcaaatttattagcttgacataattttccattagctattttaaggaagaaaatgaatatgataaattaaagttcagctccctctaatttgatgtaatcttaattctaaagtggtacttagtagcggctgtaaatgaaatgacgatgttaatgctgcaagtagaaaattacatagcctttttaagaaagagtgccttttaaaattgtgcttgctgactcatcatttctgtgataacccacaaaatgatcagctgcattggttacatttataaagtcacaagtatatgttagtaggtctaaagtacaaaataaaccaggcaaccatgaaaaaggaaataggcatatactagttcttttcatttaagaagaaggagcaaatctcatagaagtttttccttagctttgtagacttgggtacccatgaaactcctcctctccctacctctgagttaaaacacggaatgtaatagaactgagataatggactttctccacctgaatggaggttcttaaagggtttcctgcttaacataattaattggtgaaaattgtaaagatacagtcaccagagggagatatcttgatggagtatgttggtggacagactctaacaagatgaattatccttggaacaatgtgaggtgctgcttctgatttggtaaccaaccaaatccacaggattggaggtaggaacatggctgggcaggactgaataagacttaaaggtatcagttgacagaagtctcagcatagccatcaaaagaaaaatgttgtggtccgtggatgtgttaataatgtttaacatgtgggaggtgataacctggattaaatctaacagttctaattaagaatggtccaaccattgtgagcaccttaagaaagagattgataaattcggatttgggctgaagagagcatgtaaggtgttcaggagtgcagcactttaatccatactgcgagtctggaggaacagaagtcagtgacgggtgtcttcccacattggaagttctgtctcatgaaataggctcttttcataaggccacatagacgcagctagggggagatagattggggtttcagtaaagaaagaaattttaatctgaactttcaaaatttagaggctgtggtggccaaggttgagttctctttcagtggaagtttttgaaaaactagatggcagtccagagagggcattaaacattgttagttataccagatgacatttttttttttttggatgacaagattcaatgactttagttgtaaaaatccgacttatcacattaatcctttagataggtatattatccaagtggaatgggtggttaatactgtttataaaagccaatgaagagtttaagctcacaagaatgtttagtaaactcatttattcatctgttcactaaacatttattgcatttctactctgtcattcactatgttaggcacaggataaaaaggtgtgagacagacatgcgcccaaggagctcatattggtaaaaactttctccttaaatttaattttatatattattttcattgaaaactagatcttgttttgttcttggtaaagcctgttctagtttttctttttctttttcttttactttccctttcccttccccttttccttttcctctctcctctcccctcttctttcttttctcctttccttgtctcctttctttgcttctttcctttccttcctttcctcctctcttttccttttccttccttccttccttttttctttccttctttacttccttctttctttccttctttctgtctttccttctttctttcttttgcaggatcttgctctatcacccaggatagaatgccgtggctcactgcagcctcgacctcctgggatcaggcaatcctcctgcctcagcctcccatgtagctgggacaacagccatgtgctgccacacctggttaattttcgatatttagtagagatgggagcctcactttgtcgtgagcaagtctctctccttgacttccctaattacaggcatgagccactgagtccagcctactttgtctttcttaagttgccatttttctcatgtcaagtaattccaactccatttaacatccttttagtattaagcttttagtatattttaaaattaatattgcctttctgtccttcatttgttattgttttattctcattcttttagttattcattcacttatttatttattcattcactgaacaaatgttttgtgccaggcactattctgggttctgaggattcagtgaacacgacagttgtgtttagtaagggaagatagataagtaattatacataaactaaacaaagtaattaaacattatgaaggaaataaataggttaatagtatcagtggagaccaaggggataacttggttgctgtctttaggttcttctttaatttccaactttgtggttgagtttggttacatctacttctgagatatctttctcatatcccctctccatcctagtatggaggaaattcaacatggtggtaatggatggcactggtccatttccctaatggaggccaagacttgacatatctgagaattttgcctgcatgctatattttctcccaaaggtttgtgcacttaatgaggcttatattatcttatagctgtgcctacataaaatcagacccaatcatttgaaaacaatttactttcaaatatcctataattcccctctacttagttgtttttccaagatttaaatctctgacatctatatcccagaaagctcttggatatggatgatttcccaaaactacacccgaggtttaagctagatgaataaaaatggaaatttcatctttggtcaaggacattttgaagtaaacaacaaagaggtagaattaggaatctaaacagaagcataaagatgaatgcattgtggatattgtcttgttacagagatttaggcaaattaactatcagtggtggtattcaaatatataaagtcctggcaaaacactgaaattagcaggcaagaatttatatgcctctaaatgggactaaaaattatttgtgtttttcaggtggcctacaagcagaaacatgatgctgccaaaggattctcagattatgcccacatgaaggagccccctgaggttaaacatgccatggaggtcaataaacaccagagtaatgtaaggaagcgcatttctcatgattttctagcgaactgtagttaagtcatattagggcttatgtttattttgctgaaatttaaacattacaacagccctgttcaaaaaagactttaatatttcttatcagtcagaggtacatctgaattattctatccacagtcattaacaccttgccgaatgcctttatgttgtcaggcactttcaggcattggaattttgctttgtacaagacaaatgtagatccttcagacctattgggttatcaagcatttccagagcttccttgacttgatgctgaagctcatggcttctaagtctagaatcacagaagaactggaagaaaggccatcaggaatcaatggcccacagaaggatcattcatgaacaccagctatattgtacccactactgttttcttttcttttctttttgacacagagcctcgctctgtcacccaggctggagtgcagtggctcaatcttggctcactgcaacctctgcctgccgggttcaagtagttctctgcctcagcctcccgagtagctgggattacaggtgcccaccaccacaccggcctaatttttgtatttttagtagagacgggttttcaccatctaggccaggctggtcttgagctcctgactttgtgatccacctgcctcaacctcccaaagtgctgggattacaggcacgagccaccgtgcctggcctattgtttcttttaggatgtttgtaagaacagatggtccaacctaagacccatggggaatatgacagcaatagatgcctaatggctgactttaaagccaaaacggaggaagtcagtcagtagaaaatcagtttcttttttggtaaaagttagcagttgcatcaaggtttgcatgcatttgctcgattaccaccaccatcctggtggcctagaagagtaatttcttcctggaattgtagggaaagcttttttttaaaatctcctcatcctgacttctctccaggaggaatgtgtgaactgttggtcaggttctttatgcattaaaatcagttaagataaaatgcctatcttttttgggtcaagaaactccctttcttggaaaagtacctgaagtacagttgccatctcacatccagtctgttctgtcacttagtccctttatggaatggtgcttggctgaccatgtgcccccatagtcccactgtgcagagtgttttccgcagaacggcaactgttatttgatattaaattgcagtaagcaaatgtttaagtaaaaaagtggaatgaggttttacgttttaacccaaatatacaaacatatgccaaaagcagagcacttttctaacatagtttaagattgctaggagatgaagaggctacatgtctgtaattattttaggggggtgctttataagaactgtttgcttaaggatgactgtaataatcataataactaccacttactgagcacagccatgcaccaggaactatgccaggactttgatcatttccgattctcatgaaaaccctgtactgattcttattttgtagatgaggaaaatgagactaagaaatcaaactcctgagtctgctctttctgttccactttgctgtctccaccttaaaggttactgtcaattagtcaaggttttaaatgcagtttttaaaaatggggagcaaaataggttatcttcagatttcaaacgcactgcaggaaagaatgacagagaaatcccgagtttccagtattttgacactgaagagacgaaattcacacaaaaggccacgggttagaaggtggtctggtgatctggggtgaggtctggtgttacacggatccccgggaggctctttccaactctataattcaatgaaattcaaatacggaagttccttatcatagaactgggcttattattttaactctgccttttcttctaaaaggtctttgattgagggattgagggaatagagtataaagcccttttctccttcattcaatactgtgtacttatgggagaaggctgtgtttacttatactcctctgccgacttgactcaacctttgcatgcaaagtttgtacatataataggatttagaaagtgtttaagactatttactcagatttaaagtgagaatgatatttgtattctacctgtgaagtagttgatattcctctggagtcaagccacttagaataatacatttgttgtccctacaatatgaaatttaaacataggtcttgaaagtacatctcttggttcagtgggtggatctatggaatctctataaaagacaatctcccataaacctgtctcctgtaaaagttcagccaaatgaaactcattgcagagaatttactagtggaattaccctttcataatgcagactgtcactttgcactatggctataaatgacttcatttaatttaaaataaaagtgtgtcattatatgtgtatctgattcacctgaaaacaatggaagtcaacatctttgcctaacttttttatgtttccaccaaaatcaagtcagatttctaatatcttttagtgaaccaagatgtctctctcttgtgcctttagtaatgtgagtaagcagaaaagaatgagggagagggctcatgtgactgtatggatgaatttccacctctgagtaatggagttcccgggcaagagttttctggaggcagtagtcttttgcgccaccccaaaattaaatgatctccaaacagtaaaaataagtatttcttagaatatcctctactgtagtgaagtggcatcattgtctggggtagtacctgaggttcatcgtctcatgtcaagaaaattaaggacacggacacacacaaggaatgaatttaggagtggaggtttactaggcaaaagaaagagaaaggagaacagctctctttgttgtgagaaagaggtgcacccaaatgggacttgtgcctcgtggcagagtgcatcggattttatagacaggcttgaggagtcggtttctgatttacatagggcccacagattggttggaccaggcgtgactttctacatagactgcaaggaagctgtttgctccgccctaattatattatgcaaatggggtctttgcctggcggtttccatgttgtctgctccctactgcacacatggttggaaaggaaaagggaagatggagctgccattttgaacatgtctactcccaggcagccttttcctattgtcacaactgtcaacattcacacgtgcaagcttacagctcacttgtgtatgtctgcagctcgattttacaggctgctctttgttagaaaagaaaaagacttcggggctgctttttattaaaaggaaagtcttacgaaggacttccttaccctcactatctgcctaaatactttattcttaactcctatatcagtagcatatactaggaaaggaatttggagtcagacattggttaaaatgtttcttgggcacacgttgcgtggatgaccctggatgagttacttaatgtctctaaatctccattttctcatctgtaaaatggggacaacgatatctacctctgaagattctcacaagtattaaatgaaacattatgtgtaaagagcttcacagcagagcctccatcttaaaagttgctggcatacattactggttctatttcgtcctccttctacttttaaagggtgatttgggagtttagggtgatgtcatagttaatttgaaacaagtaaaggaagttcaatttataaaaggccaaatcaatgtgaaatttatgttaagaaatgtttaggtcggaagggcatatccaaaagtttcctgaacctatcttattaatactataatcagaaaatgattaaaaacagccaatcgaaatctttttgtaccttaagggacatacccctgccagttttttctaatgtaattagagaaattggagatattctatccagtgactttcccctaaagatgggcttataatgaaagccctagttccattattagttctcatcagtcttatgagagacatgaagtccaatagttctgaaataagtcaaacaaattttaaactctattttaagttttgtaagtaatgtggtctatacagacttgtgatgaaattggagtggtaagcttttccaaaacaccatattggtagtcgattcaatgtgtattagaaagaagtattcagcgtgggaaatgaaagacttactgttcttttcaagaatgatatatgtactttcttaaaattaataaaaacttatcagtaaacaatttctattccatcagaaagtgagaaagcttaaagataaatcagtaaaatgatactagaaaaacaattatggctctctgtggttccccgatgagacttacaataatagtgctttaggatttagcattaaaattagatatattagtgttttattcatctctaagacagaatagttagtaatacttattctgccttctacacaatatggtggtgataaaattaaatcatgaataagaaaataagacaacttttatcaactatagatttataaacagtgacagcaatcctaaatgataagccattctggccataactctgtattttactccttcttttggaagactgaaaactttttctctcttctgaatagtatcagaacctacttttacttatatttaaaaggcttatattctcttacagaaaaataatatttacaatttaataatttagtaggtttttatgcacagcatgcctagacaaagataagcatcatttgagatggaattagcagtccacatgcctatttgatgatacctggagggcttctctaatgtgagagttttgctaaagacaaaggttttcctgagatgggttgaaccattgcttaaagattaccactatataccagttacatgatttgcctctgttccacaaacttaaaaggttatatatcctgtctagtttcttctcaccaagaatcagtttaaccttcacagggttctgggtcagctggatttgttttctttaaggtctgtctgcccatgcagactttagaccccatggctggctggctggctggctggctggctggctatcactcctgcaaggctgccattcctgagctgtctcaatcttctcatctccaagtgaaagtcatctccttgacttccacttcaaggagagtctgtggaggttttgcttttctctggtttattaactcacctaccagagagtctcaaatcactgttgcctgagtataaaaagcttgctggaaggccactgtgaatcctccagctgcacatgtgtctgcctatacctgcagaataaagatgtctatttcacatccactttcaaaatctcatatgcatttctcttattggccatgtctaacccagaactatttaaggaaaggtactctggaggatgtagttccagtcttaaaagggagtgttgatgtagcccagttgagtcaagacacatcagggatgaagtgaggatttaatgaattgatgcagaaaaggatagccgggcaccttggatgctctgcacgagcatagggaacatgcaaaagacatggctcttatgaaacagaagtgggaggattataaggagagaacaagctgagattaaaagacaataaaataagataaaaatatgagctcagggtgaaagtgaatatggcgagataaagaaattcagagacagattttgatggaattcaaatattcgttggaagcaacaaagaacagatttggcactgtagaaaaatgtgaggctgggtgcagtgactcatgcctgtaatcctagcacgttgggaggccaaggtgagaggatcacttgaggtcaggagtttgagaccaacctggccaacatgataaacctcatctctactaaaaatacaaaaactatctgggtgtggtggtgttcacctgtaatcccagctactcaggaggctaagacaggagtattacttgaacccaggaggtggaggttacagtgagctgagatcatgccactgcacttcagcctgggtgacatagcaagacttcatcttcaaaaaagaaaaaaaatgaaaagtgaaatggaggctgtgttagaactctctagatttcgtgacggaaatctatctcaagttagtgcaagtgaaaaatgagattctgttgtgtatgtaattgacaaatccaagctatcttcaggcataagtgggctggaggctttacagtgttaccagtactcttcctctcttcccatctttgggctctgggctgtgtatgacactttcagacaggtgctttctctgtggcttcaaggtgacagctggtgtttccaaactttaatcatccttacagcagctgatctcagagaaaagaagagaagctctttctcctccagcctcagatcattcaaatgactctggccttggttgggttacgtgtctgtccgatttcattaatcatggtttccaaatggatggggtatctggcaggacagcctaagtcaacatgaaggcaggctgaacttcagaggcccaccaatcacatggagtgatgggggagctgtttccaaattaaaaaacctaggctgacaaaaaaatttaacacatgcccactacaaagggattagataggagaatgacttagataaatgagaaagaataaagagataaattcagtgaaaagaagctaagaggaagagatcaagcacataaggtaataattctaggtgttcctatggaagaaaccagaatcactattttcagataagactctatactgttattcactattaaaaggaaaaagtggatcatcttgagtacaagataaatgtataaaaatgatagtatgataatttctttgcccagtgacagacatatagaacaaaatgatgaaacttcatttaaagttataataaaatattcgaagaaatggaggaatataccaccttctcataggaaaagactgacattttgttatgatatcatttttctttaaggcattttatagattcagtgcaatgctcattaaaattacagttatttgttttgtggaattgactaaaattattctaataaaaataagaaaataaatgaaatagatgagtagtaaggaaatgaaaatttagcagatgttatgattgtttgaaaaatttcataccgtcataccttgaaaaaatgtatgagtgagggagtgaatgttaagtccttaatatggtacataatagtctaaaattgagactatcattattattattttctttttctcccctcctccttccttctttcttcttctttaatctttctttcttcttcctcctcttttccccctcctcctcctgttcttcctcctccttgtttgttctctgctatgatctgaggacagagtagggaacaagacattaaggaaaataatgtaaaagcaattattggccctcaagttcacatctctgctgagttgatgatttcttcttttccctgtccttatgcaaaacaagatttatagagcaccacattgtcatgagaagactgaagagtgaaggccagtccactgttccaatatggttagcatttagggtttgaatttattaaggaatagaaaaaaatatgtatacacacactttgaactccaagcctctcttctgctgtgttacattttttattcttcctgagctctgatggatggtagattggagcaaatacttattgagaaatgtcagatgagcttcccttaaacctagtgttacaggaaacgggtcctgattcagaccccaaaagacgttcttggatctcacacaagaaagaattcagggtgagtccataaagtgaaagcaagttcactagagaagtaaaagaataaaagaatggctactccgtagacagagcagccccgaaggctgctggttgcccacttttatggttatttcttgatgatatgctaaacaaggggtggattattcatgcctcccctttttagaccatgtagggtaccggcctgatgttgccatgggcacttgtaaactgtcttgatgctggtgggagtgtagcactgaggatgaccagaggtcactctcgtcgccatcttggttttggtgggttttagctggcttctttactgcaagctgttttgtcagcaaggtctttatgacatgtatcttttgccaacctcctatctcattctgtgacttaaaatggcttaaccatctgggaatgcagcccagtaggtttcagcctcattttacccattcccttctcaagatggagttgctgtggttcagatgcctctgacactagcaatgggttacgtgtaggaatctgtgtgagaagccatgttgccattccatatatattcagacacccttggagatagtgacatcaagagtgtcaccctcttgaatgtcccccaacataagccccctttcctatggaatattcccaaggagtgatattctggaagatctgacaagtgatcaggcgcggaagcttttttctgtgtggctccgtggtgtcctcttgtttgaatttgcagttcatgtcaatcttaatatttgttttgagtcacatatgccggcttctactttgcaatttacatggatgatggggccctattcaaagtcctgctcctgctgcctttgtgccgttcacctctcttcacgcagtcattaggctgaacaccatataattaggtaacccatgtaaagcttagatttctgaaaggttgtggttcttttcaaaaagtaagggtttccatttttaccctcattcttttctaaacaaaaagacatttcccccctgcggttttcatatgaatgtagtaacttagaaacagttagtcttgtaggtgggtgataatttgggtttgttttcacctgagagccagtttttgtttacacagcttgtatttaactcagggtaggatgagattgatttaccatcatttgtggataagcatgttgctttttgaagccaatggaattggcctgcttaaaaaaaaatccctaaagatttaaaatccacccaacaaaataactcagtttcggccttatttttatgttccttttactacctgtgtgcataaaacctacctgaaatgacttgttaacataaaacctctgaaaatataaatgtggaagaaaacagatgttctttctgaaattatactaattgtgtttcagctgtgttcacttgtcagacagattcatgattataagtgtagtttaaaaaatagtcttggtggtgaagcaaatgtaagctcataaaagagtaagtagaagtgtatataaatgtttcattgaaataaaataacataacgcacagggagcctgttgatgtattaatgcattgtcacttcttacacttgatcttatttttaaaaggagtaagaaagggtgaaatttttaattctgctagattgaaaggaaactaacaagatatatgaatattacccagaacactggtttatagcagtcagctagggaattcattaaaattagatttttgggcaccatctgtcaaaattctgttacagaggattgtggctggacctcaggaatctaaatctttaataagtacccctaaatgatgctatttcagaaaggttgcaggtgacattagaaatatttgtacacaatgtaattaagtgtgcattttgtacagatgtccagtgacacatttctgtgatctttctgtgctctgaaaaaaggaagatgggttttaagaatgtccatgactgtacactttgcattatgactttaatagaatatattttaattgccagctggtccctggggatattgccaaatagaaccacatctggcaaatattgcttcagctcaagacaaatcgcaagaaataaagaagtgagctgaccagtgaaacatgggccatcggacattatgccagttcaatttttgtctctctttccaattgtcagtcaagttaatctaaatgacgaatgtgatctaaagtacatttggcaaagtttatgtatttttctctttaaatctctacttaccatactttggtttgtgtctaacatgcattcagaaggagaatgttactcaatgtaattgtttttattttgggaggctcaagtcattccaatgatatttattgggtgataaagctctcagtaccttagatctcctaggcatgggcctttgaacatttgaagggagagaagtgtgtagttgaaagggcaaatgctggagaactacagagcttcaccacccaccatccccaaggaaataatttgcaatattcttgtgcttgggcttatcttgcacccactggggcttgagactttgtgatgggcaagttgaagttcttgatgaggatattctgcttatgaatataaatatatgcacttagatacaaagacatactcataaagtggtagatacaaagaccctttaagattggttttgtgctttgatcttagtcttatttcttaggtagcataaattcagttcaagttttttttttttttttttttgagataaagtcccactcttttgcccagtttggaatgcagtggtgctatcttggtgcactgcaacctctgcctctcgggtttgagcgattttccttcctcagcctcccgagtagctgggattacaggcgcacacaccatgcccagataatttttgtatttttagtagagatggggtttcaccatgttggccaggctggtctcgaactcctgacctcaagtgatccgcccacctaggcctcccaaagttctgggattacagacgtgagccactgtgcctggcccaaatatgttaatatcagtgagacataggtatagtataaagagttaatatagctatacaaatagatgcacaaaaagccaacttaaggtcagtaggctctctaagctattattatgagaataaataatgttatgaacactaagactagtagctatgtgaaattactaatttatttattttttaaccaaaactgtctctgatcagatttcttataggaaagacgtgcaggacacccacacgtacagtgcagaacttgaccgaccagacatcaagatggcaacccagatctctaagatcataagcaatgtaacttctctttctaaaccttgaacggaaatgatttcttacttttgtaggaggcaaagcatagcttcagtggttggatggttcatttaattagtgtaactaatcaatataaatgaatacatctcaatttccccccctaaattatctattttattatgttaattatttgggtatatgcagaaacagcccaaactcaaattggctgtggttagtgtcatcatacttttagagaaataaatactatttaggtataaattgacattcagatgtctcagcctgaaagtcagggttatcagtcatatggtcccatataatctctcccctcaccttgctccaaaggctcttgcttggccttgtttccatattgctgctgttcattgtgtacattctcttccaccaacacttacctttgtccacttcctacatggcgtaactgtttcttaccttctctaaggtgcccgctttagttaataccattttacttcaacatgctgaaaaccctggttggaaatgatgatttaacttgaaccaaaaattttcataacataggctaaattcaccctaaaatcaatcattactgtattcaactgcatgtcaatcaagtatggccagaacagttcctgagaataaacgaaactataaaagctacctatatggagagtacagggtctcaattccccagaaaatttccctaatattttgttttagtatttatatataattacaaacatgatgatgactgaacacttagcctcaaagttagtaattattttactgcaaaaagttgagtttgttcatgtaagcacaggataaaatcaatttctgctttagcagtcaacattttagtgtttgatgtgttgtaaggaatattaatgagatgaaggtctgttattttttttttttttggctaatgtcaatgtagttcatcattggagggtagaaatatttaacattgtcttatttattcattttaggcagaatacaagaaaggacaaggaataatgaataaagagcccgctgtaattggaagaccagattttgaacatgccgtggaagcttctaaactttctagtcaagtaaggctttagtgatgattccacaatgactttattcagatattttgtttctaacagcacaggagaatattgcattttagataatatctttaattgcaagaataaacagagataatgtttctgaacccagttcagatgggcttgcaatcattatgaatttcagtaaaggaaaaaaattaagtctaattttaagcataaaacaaagttttcttttctccaggcataaatctgaacatttttcaatgtctctagccatgttgtcacatttccctggatttccagaagtcattaatagtcatactaaataattgtgttttaacctacacacacacacacacacacacacacacacagtttttaacttagtaataaaaatattaattttcccaattttcaagtgcttttgtttaatcacaaaatttaaaaagggagatgaaaatgaagaaaactttgaagtcttatcaaagagcataaaataagatctgaaaaagtataaaggcattttatgtttttggctgaaagtttcaatagataaagatgtcagttctttcagaattatataaacgtcatgcaacttctgttagactccaacagcgtttttttttttttttaatatagataaaatgatcttaaagtttgtgtggaaagaaaataccagggaatagcctttaaaagtatgaaaatgaagaccagtgaaggggaacttaagttatgagttactataagttaatagaaaaccactgaaattaaatcaatatgggattggtgtagtgagagattaaataatcagtaggatagaatagggagtcctgaaatagattccagtatgtataagaatttaatatatgataaaagtgtcgattcaagtcagtgggaagaagttggattagctaataaatggtgctgacataacacaccgtctgtcatgggaagagcaaaattggacccaaatcttaaaccatatacaaaaatgaattccaggtggattaaaaatgtgaatgcaaacaataaaataattttaaaatcttcaaagaaaatccaggagactctatatactacataaggataacagagttgttcttaagcaagaccagaaatccagaagctataataggtaggcacattaactatgtaaaaatgaaaaactctctgaatgaaaaaggtaatgtttgcagagtcaacaataatgttaacaaacagtaagttttacacatttatagtttttttgactttgaaaatactcatttctcaagttgcagaagtcttacttgaattacatttcaaagtggagagatgtaaatgatgaaaggtatgaagtctgattgaagagcataaaataagtcccgaacaaatgaaaagacgtactattctgttggtgaaagagccttgatactaaacatcctaaaaaatgttaactctttcaaagttaatgttaaaagctctatgcaattccaattgcaatccaaaaagagggtttaaaaaatttaaatgaaatgaaaaacttgaataaattaaataattcagagtttatacagagaaggatgtgtctgagaatagttttttaaaatataaaaaaagagaagtcttcaaatacttggaaaagtacttctaatgcatttgatgagaacattttaatattttaaatataagatctatagtgtacaatatctataatatataaacattcttgaaaaggaatttatttttgtatatagtttaagatttgggtccaatgttgttcttaccatgaatgaaaaagattaacggctcagtagaaaaaggggtcagtgaaatagataattcacagaagagcaaacataaatggccaatcaacaggtgaaaagatgcccaaatttattagtagaaagggaaataccaacaaagtgaaagcaaaatgtcttttacacccatttacacccatcacaatgtgtcttgttagtgtggagaagaaagacgcgtccttagaaggttcatgtgtaggaggtagattttagctaatttggatttaatgggagaagtaaactctactcaaggggaaggccccaaatacaggctgggagtatgcctgccaggggacagaaatctgatggcagagcctctgggcaagaggatatagttgtgcacgtataaaaaggattttgagaagagtttagatattgtgtgatgatgaatgggtcaatgtgtattgattttgagtataagccattgcttagagaacataataggaataatgtgttcatatatgtaatttttccccatttttttatcgtgataagatttatataacataaaatttaccatctgaaccgtttttaagtgtgcggttcagtggcattaaatgcgtttgtaatgttgtgctaccctcaccaccatccatctccaggactcttttcatcctgtaaaagtgaaactctatacccgttaaataataactccccaacgcccccttcccagaatggtgtgttctatgaaaaaataatgataaaaaagtgatttcagagcgcaattataggaagcattttagggttcaattccaaaaagtaaacatcagaactactttttgccatgttaactgtagtctctcagggaagaaagaagacatcactgaagattttgagcaaagattgattgtgaagaaaacacttagggaaggttaacatggtgacactgggcaggaaagtctggctcacaaatggtgaacctcccagaagccagctgggctgtgacagtggtaatctacacataaagtgatcagtacctgaatagactctgtgacagtaggaatgaaaatgaagtggacacaactgctccctgggagaggcagacatgagagatgcccaaatgcaattgtgcctcatagtaattgttttacagttaacaagggactttcacttataaagcgactttataactcaggaggctactgatgtgcaagaggttggggacatgtctgggtgacacttgcattaaagggcggtgactctaagctctacatattcccagtaatgctagttgaagagacaggggatatgggcatcacttcagatttccagcatagctactggcctcttacaacttcgcccttttctggggacaaagattccccatcagttacacaggagacaaagcaaatcccggagaagcagtatggtttggtctagtggttaagaaaatgtaccctggagctgggctgtacctgggttaaactcctggttctgttgcttgccagcagagtgatcttggacaaattgcttcatttctctatttttgtttcctcatttgtaaaatagggatgacagcaacagtatttacttctcagggctgctgtgaaggttaaatgagttactgtgagtaaaacacttaaaatggtgcctggcccatagaaacatgacataatttcataggaataattttactttaggtattcaaaatagttttctgttctacatttttagatgaattcatgcacagagtggagaaggaatatgaacactgtctgtgagattctggccttaaattcattccatcacaatcctatttgagagcccttagaagaaagttttgacatttgagctttattttcacatttcaaattcaatccacaaaaattcccccatgtgatccttacttggacttgaaagcagatttttttccttcaatctcaaattatttagcaactgagtgatcagattcttaagcagattttaatttttaacttacattatagctatcgtattcattttttcatgtcatataagattttataagctgtataaaactcacaagaaaaggggaaagctgggaaaataaataataggaattctgggatgaactcagtgtattccatttgtattttcaggtatatcaattataacagaaatttgggcagcaagtttagtttcttattttcactgacagcattaaagtttttagtttgctcctaaactaatgataaaggcacataaatacatagaaggcaaatgatttagggatttaataacagggagatgagaatggatagaatgcagggagaaaaagagcaccacagcaccagaagcattgtaacagagaaggcaatgacaaggcaatggtcaaagtatgtggagataagacctgtctgatgaaaggatgggaacagagagtgaatgggcaggattctcaccttttatctgtaaattgaactctgtgggattttacccaggaaaggtagtgggaacacataccaaacccttcttatattaacttctacaatagctttgctcccgtagttgtaaactttccctttttaaaatttgcaatatacatacaattatggccaggttattttaaaaagtcattaaaaaactaaaacaaaaatctcctatgcgaagatgaagggattggtgcatatgtatctcagatttaagtacagtaactgttgaagtcattgactttaaaaattctaagagtagtttattaattaatatatccatagatcatcttgttacttggaatttgtctatatgatgaatagattccttgttcagttttataacctcaaggaaaagctatgtatttataataattagcattgttttaaaattgcattaatacattgataagaatgggttttaaacctaaaaatcacattataaattgccatgaaaatttagtagtaagcagtggccttaaattgcaaggggtattaattggtttggggaatttaccattctcccatcctggcaagcactccctcctccaacctcatcacacccaagtatcagctcaaatatcatgttcctgactcgccaatttaaatattgctctcctcccctttattctctcctcttctttacagttcttaatacgatttgtagtagttgcataatatatacgtgtatgtgtgtgttttcgaaatccatttcacttcccacaaggcaggctccatggagacagggctcatatgcctttgatccactattatgggaaaacagattaggctgccaataggtgtatggagcctggttaaaccaatattctctggatcattaacatttggtgcaaagtcagtaagacgttattttgcaaggaaaataagagcagagatattgtgttgtgtaaaattaagacttaaagatattattgattttatgatgagttctatgtaaaaatctgtcctgtcttccttgacagcttttagtttgatttcatccaagattgctggggattgatatctatagatacgtagtattgtgttatttgcttacttttcattttcaatgataattaaggtacacttatcaagctatttctttgctaaaatgtgtttatgtggctatggtgaaacaccttcattcagggtctgcttttttgtgcctttgctggctttttgcgattctgagtcacagatgatgtcagtgtaaagttttgggtttgcgtgttagacttcacacatacccaggtgcagttatgaggatctggatcctcatatgaggatatgcagatgtaacttctcatttctttatatgagaagttgtgcagttatggggagctacaatgccgtcactgtagcttaacagtatccgtgttttctccaagtgtgagcctctgaaaatcctgctgtctcttataattctttaaaaaacatctaggagtttgatcctatatacctatacagtattttttcaaaaggtgttatttccctgatgtgattattatgcactgcatgcctgtatcaaaacatataatgtaccccataaatataatacatacacctactgtgtacccacagagattaaaaataaaaaaaattaataaaaaaaggtgataaatattgggaccactaggcacactagtcataatgtaaataaagccagtcatatggagtaacttcatttgtttccagaataattatgtaggtataaggagtaacattgtgtcttaaaaccatggcaaagtcactccaatacctgttcctccctttctcaaatgatcttaaaactgaaagggttatgccttgttccatggttggataacaagttatagtcaaggaaaagcatttcctggatctctcagaagatgcaaacctgcatgaggaggtagacacacagatgtatgaactctagattgaaaatacaatagaatgttgagtgtgtctgtgtagttggcgagtgaacaagtccgaaggtgagtgatgtgactcactgcaaccatttggtgatcttagttcattttacctgcattccttacagaaagagcgaggttagaaacaattgggtgtcagtgtctggtccgtgcatttttttatataatgtagttatgttactattgtggttcattaatgagggaaacttgtgtttttgttccttaggcatcttgaatcaaatcactcactgtactgaacgttcaaacaagataaatttcacaatacaatgcttattattacatttaatataaatatatgaataacagattgattattgtttcttagaaatgcatagatggtccctgacttctagtggttcagtttaagactgtttaaccttaccatggcgtggaagtgatacacatttagtagaaaccatacttcaagtacccatataatgattctgcctttcactttcattacagtattcaacaaattatatgagatgttcaacgtgtgtaaaacaggcttgttattagatgattttgcctagctataggctaagggagttgttctgagcatgtttaaggtaggccaggcgaagctgtgatgtttggtaggttaggggtatatggtgcatttttaacttacatttttaacttacggtgggtttactgagatgcaaccccatcataagttgaggaaggggtgtctgtaacatttacttgggagagcatatgcaaggtttaataacaaaggaatttatcagtatcattttcaaatactctagtgtaattatgctggaaacctcagagtttgcaaaaacagtatgatgggctctgtgtgtgcaaagatcatataacctacttttaccatttagctaatacagtgttaatgaatctggctgagtcagaagtgtcattccagcggaaggctgttgaagagtccaccatctttgttcagtgaatatcctttaggcactacaaacttaggagagacagaaccagtgacgaaaatatggtaaaagtatagcagaagggtgaagagggcaataagactgtggctgggcgcggtggctcacgcctgtaatcccagcactttgggaggccaaggtgggtcaggagatgaaggtcaggagatcgagaccatcctggctaacatggtgaaaccctgtctctgctaaaaatacaaaaaattagctgagcgtggtggcgagcacctgtagtcccagctgcttgggaggctgaggcaggagaatggcgtgaacctgggaggtggagcttgcagtgagctgagatcgtgccactgcactccagcctgggtgatagagtgagactctaagactatatatttaagggacgaccaggcagagtgaatcattgcttttgtgccacctactgtataaagtactgaaggaaatctaaatttatttcatttgtaattttgttattgatttcaagacacaaaataataaaaaaagtcagtttttctttttttaaagagttcttgctgattacttaaaatcagtttgtaaggtattgagaatatcagaaattttttattatcaaatggaaccagaacagaaaatattccctgtaaaccatctcaaaatatttaccaaatgctgtattcccaccaagattttctctagctctctctaataggttccaaacatgtgtccctgaaggagaccatcaccctatgcatgcctaaaatatttgatgagagtcatcccaaattgctttttaataaagtcttctgcaaagcagagcctttagatgtatgaataaaggtgcattatcagaatgttgttagaaaaccaaacatggtaataattataacatcagaaaaatattatgagagaacaaaacagcttactttgacctgtgaaatcaatacaccctttcctggctacagtaagttaaagggggtatgacatgtgaatagctaggttttttttttttttttttttctttttgtagtgaacttgtgtttatattctaattagttatgacatgcattctcatatttctctatacatggagaaaaatatagtcctaccaaataagttgataatccctttttggttgttttaagagtgctttaaaaggagacaaacaatttagagagagtattggagatggttttcctgctgaatttagtggaattaaagcagagaaagttttacattgacattaagttgacccaggacatttcagaaaatgtaattcctaaaactaaatttttgagcaaatgaagtataggaaatgatgagaaaaactgtggtacacgtcatgctctttatttggaataattcccttaggaaaaatatttaaattctggggcctagaatctattttctaaatgtgttagaccttaagacatttgtggtctaggtttctaactgatcatagattatagaaatgcagaaatgaaaactgacatttaaaaatgttggtattttagtgcataattctcattaataggatttgagttcatgcctaattgcatttgtgatcaatgtagaagcagagttttttttattaaagataaaaacttttgtgcctaattaagctttatagaaggcgatggataccaggaatttacacttggcaacattcatttttaaggtagcttttattttatctacgtgaaaatcatatgtgttacttttaaatgtaaagttacatgtactatttctcttttatgacagattaaatacaaagaaaaatttgataatgaaatgaaggataagaaacatcattacaatcctcttgaaagtgcttcttttaggcagaatcagcttgctgctacactggcgagcaatgtaagttgtaattcatagaaaattattttcaaaatcttttgattcttgttttttttagaatcgactgtgttgtaattactgatacttagcttccaagtaatttgtagttgaactgaagcatatttttctaaagctttttctgagaaaaatatattattgtaattaatttttaatggttactgattactaattagttaataagtaggaatagtgttgcaaatgaagttattatatctgttcaagagtggaaatagattatagaattttgcagagaagtggtctgtattaacacaaattagtggttaggacagtagttacctcatgtaattatggctatgaaattgagtttattgtaaagtactgcctggtacatggtaatttatcatataaagaaatttttagaaattttactgtaatgcctcacaatttattttttatcccttgtgaaaatgctgtgaagtacttccttatgtgatttgttttcattctgtgtttttaaaaatcatcaaaattcattttacaagaaatgatgttttaaattcttgttagaattagagtataaaaacagcaacatcaaaaaattgattactttgctatagttgaaaatatttagatttccttctcaagtataaaaattatgtattattgatctgttgctttcttagaaatagagatgaaatatacttaaaggaacatggaacatagtgctgaaagctaaaggtttggagtcagattgcttggatctaaatcctgttttatcaagtattactatgtctttgtctttctatgcctcagttttcttatctataaaatggggctacttaaagtacctacttaataaagaggttattgtggagattcaatacttaatacatataaaggaatttagaaaagtggcacatagtaagtgtgtgatatgcttgctatcaatggtttattattactggtattatattttcaaaaagttgctttaaaaaagcctgtggtgataggatgggaaacatcaaaatcctcagatctccacaaagcatagttgaaatactgtagtaatttctaaagaataaagtggctattctctttattttttgaaagcagagttactgtgaaaattactttattctattgacattacccttcctgaatatgtgaacaacaaaaggaattatccaagtattctcaagcccatatagaaataactttttaaaattcattcagtagtaaatcagcaccatctagtggctccttgtaaattcgtctgtccatttaccactaaatagtcctactttatgatgtatgaaaaatgcaataatgcaaaagcataatattttcttctcctcgatggtattttgttccatgttattttcataggtgaagtacaagaaagacattcaaaatatgcatgatccagtttcagatctcccaaatttgttgtttttagaccatgttttgaaagccagcaaaatgctcagcggcgtaagtggttcatctagcggcaaccgtagttgccttgtggctccaagaagccaatatgtctgcagcgttcatgtgctcacctgcttccttagaaggcctgtgcctcactcctccctcgttaactaactcattgaaaaacagtcctctgcttgcagaaatcccaccagagctgtcactttgcaaaggaggttcttgcttgctctccagtatctcctgcatacaactatacttcaaagtgtctgcacagtggcctttccatcattcttctttcccttacttcatctgtgttagattaaagccacttgaagttcaggctctcaagtcagggatattttactttatgcaggccagaccagagtgtcttgtatttagtacgccttcagtagcatgaaaaattgtcttagtctaaactgtattttctctgcaaataattcctaacagcatttatactgcattgacacatcgcttttagtcttgtcatggtttccatgttctcggtcaaggcaaccagaagagaaaggtgagttcttcatgtcttgatgaaaatatctgggtgcactgcccacgtggtcagtcctgcaggactctcactacgctgaatgctgtttcaacccatagcacatcaggaccctgacttcgctagctctcgtaactgacagccctaagacacatttggctccattttgtacatctcatggtggcaatgagctcttatttgaccataagttatttccatacctattttaataatcactttctcactcacttgctcaaaattaatcataatttattgaatatctgctttgggccaggcatagattagatgcagaaatatatgttggggaagacatgagaaaaaatgaagatagttgtcttcagttgatgggcctagacttagaaatctataggcaaaacttagtttccagacagttaaataaggagatacagcttcaggtcaattttagaaataatctatacttggcttcagtgttttgaaatgtatgtttattattttgtaagcctcctttctggaatatcactgccactgtcttccttccttaatggtattatgcatgcaaataattcatacagagtttttaaaagtttatttttttctggctgggcatggtgtttcatgcctgtaatcccagcactgtgggaggcgggtggatcacctgaggtcagaagttcaaggctagcctggccaacatggtgaaacctcgtctctactaaaaatacaaaaattagctaggcgtggtggtgggcatctataatcccagctactcaggagactgaggcaggagaatcatttaaacttgggaggttgctgtgagctgagatggcaccaatgtgctccagcctaggcaagagtgagactctgtctaaaaaataaataaatacatagaataaaataaaataaaaataaatttatttatttttttaatcattggtccttggatgaaaagcagtacattaatgttcccaggctattgaacagggaatggaggttagaggaatatctggagggcccagaattggcagtcagttccaggacacttacatcatgctggcttgcacttcagtcttcattcccacacctctttttacattcctctattccttgagtgtctctatttctgtcttttttctccacgactcatagatatgcttctaaaattgatatatttctattccctgagccccctgctttcttcacattcattctttggcatccagttttcatcatggcagtggcatttgcccttgacctttctctagccatacttaaattcaatttcctagggacatggggattcatgtgtaaataagccaataaaaatatcatggtggtaatttcaacatttggtggctggaagaaagcgtgccactcctatgcaatattgcttttcaagaacgttgacctttattttataataacagagaaaaaaatcgcagtctaatataaattgtttctatcatctcttcaacagagaaaacacagcaaagtcatacgttacttatttcatgtatcatatataaagtttagatcttcatttaggtggtgcttttgcctagaggacagatttctttttccccatagacaaattgtgattgactacttcctgggagagaaagacttaaaaatgtgttccttttgaagtgtctccttacaaagttgtgtacattgtataaagctgtatacatttgctcaactttattgtatattagaatggcctcctttatctagcatttgtgaagaaacaaagaatagcctactttaacattttaatgtaaaaaattggagttgtgttgatttataaattaaaagattgaataagattgctcaataagagatattctgccaaaattatccatttgtcacagtagctattgttttaaagacccctagatgtctttagcaacatcagagttacttttattttaacccaaactctaaagagtgatatgagtgccttaattactgtgtaaaatcattctaattaaagttttggaaaacattttcccctggaaaatggacctctggtagtgttgagtttctttcacaactttacataaattaagaaatatatattttgtgttactccgtgtatctcccactaggaggtagcagagactgttatataaggaaagacacgcattcgaagttcttttgcagatcttaattcaattaagttttccttcgttttttttttgttttgttttgttttcttaaataggagtttctgaaattctttgtaactaaaatcgataattgtgttgggaacaatatttactgaatttttcagtatatattcattattttacatatatttatatgtatttgttgtggattttaactcagtaatggactatgttgtagcttgttacattcatgattattttataaatacatattacaagataacttctaatcaaattataaagtctgtattattatctttctttccagattttaactggttaaaaaaaaaacactttttttttttttttaagacggactctcgctctgtctccaggatggagtgcagtggcacgatctcagctcactgcaacctccgctcccaggttcaagcgattctcctgcctcagcctcctgagtagctgggactactactactaggtgcaccccaccactcccagctaatttcgtatttgtagtagagatagagtttgaccatgttggccagggatggtctagatctcttgacctcatgatccgcctgtctctgcctcccagagtgctgggattacaggtgtgagccaccgcgcctagccaaaaaaaggcttttttaaaaaaacattagaggagccaaaatttataacttgtttccttccatcacgatgtactctgtgggctaggtgcagtagctcctgtctgtaattccagcattttgggaggccaaggcaggaggatggcttgaggccaggagtttgagaccagcgtgggcagcgtagtgggaccctagctccacaaaaaataaagaaattagctaggcatggtgacatgcacctatagccccagctacttgggaggctaagatgggaagattgcttgagcccaggaggtcaaggctgcagtgagccatgatccctccactgcactccagcctgggtgacagagcaagaccctgtccaaaaaaaaaaaaaaaaaaaaaagtactatatgaacattttcatgtccttcctggggggtgctttcctccctgattttattctggttaggtttgggggaacatatattgcagctccctaattgagtggaagcacctgaggccaggctccctctggggactattgctttgtcccactagaaagggtagctctcttgtggcaggccacttggtcatctgttccattcctagcactgagctttcttcctctttcactctgaaatccctggagtatcccctaagatcaaaatgcaaatttccttatggccagctctttcccgctccctttcaaatactgtttttggatccctccactctattgccatttttactggtaccccattgtctaataagcagctatctttagcttcttaagtctctgtagccttgagtctttaagagctaccatttactactaaaggtcttttccaaataaggcaaaataacaaagtgtccaatctccaatgatagaaatcatgaaataattatttttaaaattttctaatttataattgttattgatacataatggttgtatatatttatggggtaaatgtaatgttttgatacaggcatacagtgtgtattgatcaaattaggataattgaggtatccatcagttcaagcatttgtcgtttctttctgttaggaacatttcaattccactcttagttattttaaaatgtacaataaattattgttaactatggtcaccctattgtggcattgaatactagatcttaaactcattctctctaacggtatttttgcactccttaaccatctccactttatctcctctccccaccactcttcccagctgctggtagccatcattctactctgtcttcataagttcagcctcccgagtagctggggctataggtgcatgtcaccatgcccagctgatttctttattttttgtagaactggggtctcactattttagctcccacatatgagtgagaacatgtgaaatctgttgttctgtgcctggcttatttcacttaacataatgacctccagttccatccatgttgttgcaaatggcaggatctcgttcatttttgtggctgtatagtattccgttgtgtatatgtgccacattttctttattcattcatctgttgatggacacttaggttgctaatgaaacaatttttgtcatattgctgcctgttacatttagcttctttcagtggccaaacttggcatccctgttcaatttggtgtcttccaaattcaactttttgtctatatgtccaaatagtagccttcatccaattttttcaccttaaaaactcaactgactgttcccagatttctcaatttctctttcaggcaccttttaccctttccttttaggaacaatagttgcttatttctcttacattttccttgtgcctctcaatcttctttgtggtggagtctttttgtataggacttttttattccttgcctctgggtttcttttcctctgttctttttgcttttctttccttctcttcttttgaacagtattaaacatattcctgtcataagataagagcaagacaaattgcttttatttttccccactttacctttttccgcatgtcctagcgctagctttccgttgccacacgctggtgttgtgaatatcctttacattatgtttgcggttaattgtcctctgcctctcttgcgtgtttcatatgctgacctagagctggtctgtcttgcattgtctgtgtatctcagtgtcagaaacctcctacctgccagccaactgcagatggggacttggcaacagctttgcagctcttggtggcttgtaatgtgcagtttgtatttctaagtatttattgctctaatcagtctctttgattctaagttgatttccccattctgtattttagcgagaatataaaaagctctttgaggaaaacaaaggaatgtatcattttgatgcagatgctgtggaacatctgcaccataaaggcaatgccgtcctccaaagtcaggtacacacttgcccgtacggtacctaccctccctgccagcaacccgtaaccatcctgaggcccgccgctcactgccgtgcgtcttaactgagaaagtacagttgcagaaaagaataaatcctgagaatattaacattacttttgaaaatctcaaacactatttgctgtgtaggtattggggtcaggggagcttgaaccatatttcaatctaaaggcattttgtaaaataaccgttaattcacataattaaaaagttacaagataggaattaattaaactatggtcaaaccacatgatgatttaaatttttctagtgtcttgatttgtcattttgagcagtaacgttaattttccaggtgcaaggtttattataatttcttatttcaattataagtgttattaaaagggaatacaatatgactaatgtattcttgattaatatttttttccaatatgaaattctaggtaccccctgaataaacttaaaaaatatcttctctctagcatactttaaagtcgttatttttttttaattctgagcttaaatagttgcaaagatgtcagttccagcatctgttaagataaaatattatatcactcttttaaatgtattctgtggaacttaaagtccataataatttcgtactcaccttcattggttttaaaaatatacgaaacagttcccctttaagtttggaaatatacatcatttctaaaaattacttattttcatttcatttatttcacaaaatttttgtttgagatggagtctcgcactgtcaccctggctggagtgcaatggcgtgatctcggttcactgcaacctctgcctcctgggttcaagcgattctcctgcctcagcctcccgagtagcagagattacaggtgcatgccaccacgcctggctaattttttttttttttttgtatttttagtaaagacggggtttcactatattggccaggctggtctcaaactcctgatcttgtgatctgcccgccttggcctcccaaagtgctgggattacaggtgtgagccactgcacccggccatttcacaaagttctatcctagtgttgtgtgttattatacttcccgatactttattgattactctatcatactctttgcaacaaaattatgtctacaaataggtattttaaaatgtgtcatatttcctgtttcataaagttctaagtttgaaaaatttctcttgggttgaattatcattaacattattattttaataacttaagaaataattgtatagatattattaaacataaattttatcaagagcacatttctgaatgaaatgaagtataaaaacttctatgagtttaattttaaacagtatattgcttaaaaagccaaccattgtgatggcttacatattattttttgttattggaagataaaaaatatcactcattttataaaccgaagtaagatgaggattagactgtaattgaattaaacatttcataatatgatattaaatattgcatagtgaaattgatataaatcatataaggtctgtgtgagtgttttactcagtgtctatgaaaaaattcagcatccctggaggacatcctcctccgtttgacagaaaaaatagagaatcatacccatgttttctttcttgttcttgatttaccaatagacatcaatgcaacctcaaggatctctctctttctcacacctgctacctatgtgtgtatgccatttgcatatacatgtataaccccatatatacgatacatatctatatattccagccatttgacaagatgctttatacaactcctagaactacattagttagttgttctaaattatttttatcccttaagatattttatattacctgtttactttccttgtatgtcattaaccaaagggaacccagtgctcaacctaaatggccagaataatatgattttagacaacaagatgactagtttagaacatatattttttcttagtttgctctgtttgtataaggactttcgatttgtatatgcttttctttttccaatgaaggtgaaatataaagaagaatatgagaaaaataagggaaagccaatgcttgaatttgttgagacaccatcatatcaagcttcaaaggaggctcaaaagatgcaaagtgaagtaggtcaattagtttgttactaattgtttaatgtaaatttgatgttttgtcatttgaaaggacgcagaatgttcagtgggtctggaaggaagagtgctgctgtgggcagattcaaggacctgctttctagacccagccacccactgcctgggatcttgtctaggtcattgagtttatctggtccttagcttctctcattggtgaattggatctcaagctagatgagcttttaaaatccccctcagttctaattttctatgataatataactgacactttcaaatgttaattttaccttttgcctttcagatattaatgtaaaactatgatgagttcataaaaactaaaaacgaatagctggttgctttatttacctggccccctttttttttcaatgaaaatagaactaacatttttaaaatacttactacatgctaggtaatatgctaagagtcttatatatgtcagctcatttagtcctcaaagtaatgatgctaggaaggtgttctctgtagattaagaatgtgtctactgaaattgtcttagatgaaattctgtatccagtaaatgttaatgttttagcacctggtcaaaatcatgaatgatttccttttctctttagtttatattttagtccattttgtgttgctataacagaataccacagacggggcaatttataaagaacagagattaatttctttcagttctggaggctggaagttcaaaatccaaggattcacatctgccaagggtcttcttgctgaatcatcccatggcagaaggtggaaagacagagagtgcttgcacatgccttagaggaggagatgggaaactcatccttttatcaggaacccaaccccatggtaacaaaaccattcccatgatattggcatcaatccattcatgaggcagagcgctatggcctgatcacctcttagagttcccaccccccaacagtgttgcgttggggatgaagttttcaacacacgaactttgaagggacacattcaaagcataggcggcgtatttgattgattttttttcaataaacaattaagagtgttttctacttacctactttattctcaacctaagattatgctaagtaacatctcgatattccccacactttttttttctctgttccagcgagacttatttgtgtgtgtatgtgtgtgtgttttccttcttaccttttcaggatcagacacacaaggttttgtctgcagcctatatcaaagttttgtgggtgcagctgggttcttaatgcaaagggatagaaatagtggatgctggtctcagtccaatacaaccttgatgcttcatgctaggcatgctcaatgaataagatcctttctgttgcccaataacaacatcaaaacaggcagaaatgataacttgtagacaaaaaaactctcaggaattttgtaagcattaactatgctatttgttgaaatgttataattcatattcttgggaaaaaggcactcagatattactatggtttactgaatagacaaaattgtttaatttcttcttcaagcaaaaaggaaaaagaattacttgtattttttgtgtcttattcagtggtctccaatctttttggcaccagggatgggtttcatggaagacaatttttccatggactggcgagtggtggtggtgttggaggggatggttttaggatgaaactcttccatctcagatcatcaggctttagttagattctcataaggagtgcacagcctagatcccttgcatgcacagttcataatagggtttgtgcttctatgagaatctaatgccaccgctgatctgacaggaggcagagctcaggcaggaatgctccctcacccttgctcacctcctgctttgttaccgggttgctaactggccatggttgatattggtccatggtctaaggattggagactcctgtcttgtatcttcttaagccaatgaagaggaatctgataaagaaatatgaagtaaccattttgattaaattagttatttgtttcaagtgaattgatactagtgaatttggtcaaagttcagaaaccctacaaaaatttacatttaatggaataaatttccctagattaccttttcttcctttagataacagtttgtaaacactgtataaagtatataaagtattttatacattcttttcattgctttactatcttccactgcagcagcacttttttctgcagcagcactttttggatggagtagagccacccaatgaatgtccctgttttgtagagataatgtggccattgtcactgacccacagcccagagaaaggtttctgttttcaggagctatcatagtgcttttgcttagtgggtcttctgaaaggttaacccatttcccatttagaaaaaaaatgtgcagtttgctgccagcactcatttaattttacataaacatgctctttggggctgaagcaaatcggacctgattttcaacgtgaaaataaaatataaaaactgttcttggagttatttctaaacagaccttgtctctaattctaatggaacagacaggtttataatgttacgttaggattagagacaagaatattcttgaggcaaaacggaaatgggttaagacagtatgaagctgttaacatacattttcactgaaagagacagggatcaaaaatcactttccttttctgagaacatttctggcagcatcagtatttcaggctggacctccttctagtttcctcccctgcccctttccctttaccccctcccctcttctttgatcctcagccctagaaacattcatgctgagcaaccttttatcattctggttgcacagtttcttaactttcttatttccttctgtggataactttcctttcactgataaatccagaaacttataattcatgattaatatattcaaatactatgtttctgtagtagaaataacagtaatttatgatttgggattttagatagtctctcttttcttcacccaacttcttctctcactcttgccaagtgagacatgttttccctgacatatattccctttaattatagtcattgactattagatgttttaggctcaaccatcatttcttgaggagagtgaaatctttcagtagaaagtatctttggacccaattcatatgctaaaggccagaaaaataaagtagctaaaagtcttagacaaagtttggtgtaaaaaatatttttaaatataggactgatgaagtaggtataaagagaatcatttgtcttagagatgtttttttattcccaagaggtaggtttgactatgagttcctcaaggaacctcttacaggtaaacttaagtatttatgatcccaagaaaagccactggtgtctttgctatggcctataattaagtttatcatactttcttccaatggcagatataggcttaatgtgtgtgttttctggaggaaatctttaaatttggcttgaaaagttctttgtcttatttcacaaatactgctttcttcaaaaagcatacccaaaaggtttttttttttctagctatatattttggctacttctagtcgtaattaacctcccttaatgacttacttcagtaaaataacttttttttccagaagggctttttgaagtgaattagctgatgtaaatgcatgcgtgaatgcatagacatatttctatttcaccatttaaagagtcctttttagcctagagatgccctagattcagccttgtaactgttatctctactaattccacataaggaagaggaaagtttctagtcgttgtttttggtcattgtatctcagttctttagttcaggatgttctcaatgcaactggttatttaactttgttagactttcagaacatcctttgtttctctccttgtggctatatccacgttgtttgttagattgctgtatggaacacatgtgctaagtgaggagacagcatgcttctcttattctccttcatggtttagagacattctttatttataaaattacctatctctataatgaataaataatcaacctggaaacagcttctctttttgcctgaataacaatttcatgcagaatttatttacttttatcatttcagggatgcaatttgaacaaaatatttggctggtaaaatctgggcccttgtttagtagatatttcacatggatggatatttttgttatttagagaggctgtctttatagtcataaagcatgcattatcactgatttttcaaatgtgtagttcaaatgttagaatttagagagtcatagccaaagagtggctcagtgttttaaaaaggctaatggtggtctgaatctaagcccccagctatcaccgtcgcatccacctttcatttcttgttgtgaactctcacttaaaggaggagttcagttataaggttcaagataaaattctcctcacagcacaacttcattcatatcaaacaccatagatggtagagaaatattctcaactccaaaatcattaaagggaaaccccctccctaaccctcaggcatcattacattttagaagtgatatttcctaaatttgcaaaagtctgatgaagaaggatgatggggacatgaacattaatgctgcttgggtttgaaggtggtttgaatggcttccgtgccaccagattttcccccagtcagtggatccactcaccttggagtaaaccaattgggggatccagtcaaatagccagtcttgttggttctcctccaaaaaatgggctgatattaatcctaggctagtaagatgttaggaagcctcacttagaatgatttaccagaggaagagtccacttaataattctcctttgtttggtagaattctaaaatttatgacaaagttgaacttatttccctgttgataggatgaccctcaggtggtagaactacctaagaaaacatcatttttgttctgggaactcttgttcaaatctcttttcaatggtcactgatatttgctaactttaaaattatgtggtcttatttaacagaaagtttacaaagaggattttgagaaggagattaaaggaaggtcatcactggatttagacaagactccagaatttttacatgtaaagtacatcaccaaccttctgagggaggtacgatcttggtgtttattattaaatattatgaagaaaagtaaagaaaaaacccaggaaatgtttacctaattctctactaattcagtgtttcagatattaaggcattactcttttttttcactttgatcttcactaataaagtgttgcattttcattagaaacaagaaagtgtgtgttaacatttcccattaaagttgcgagaagaaattacccagatttcctgggaaaacttgaaaaacagcctagttttttgttttagttgtagctcagaagctctataaatagttttatagctttatagcagtttttaaaaaaatgttttgaatatgggtggagagagcttgattctttcaaatttagttattataaaaacattttagaaccaacttttcctgtcgctttcctgcagcaaatgtctctaaaggaaggaggaaaaagaccagagttctctccctttcttgacatttgatatcagaaataagatgctcacatgtgaaggtctggataaatgctacattacttataagtagtttgtgttctaagtagggaaaaataatatatttaacatatagaatagaggaactcatgtccacttttcattttattctctgcaaaaatttccccaaaaacataatggtgcactttttgctcacaagtaatatattaaattttcttaatattaagaccttaaaactaaaaatatcatgtctatagtccacctttaaaagcttttttttttttatgttttttaaatggtcaaaaagtagctcatagcttttccaaatctgcttatatactctttatattaagggaaagtgttccctaagtataaatgtagtatatcatgtaatatttgtatatatatcttatacacaatataatatatattttatgatatataaacggaatgtatattacatacatacatatgaaatttcatttcattttgaatttttgaactgaggaaactattcctgaaggaaatctcttagaccagtgaaataaatttgagattaattgcctataggagcacatcatcatgaacttctttaataagcaaatgctaactggtcataccgtttaactggttttagaaatttaatgtgattcagtgttgtaatatgtaatgtgctgaaatagacatgtaatttctataagagttctcttgctgcactatcttttctcacttctagttcctagtaaaaatttttgaagttgaaggctaagcaaatggcaacttcctagagagtagagctgtgggtattagaggctaggacacagtggcaggaggagaggatggggagaggttggttaatcgatacaaaggaatgagctctggtgttctgcagcaccgtaaggtgaatatggttaactataattgattggatgtttttaataagctagaagagaggattttgagtgttcacaacacaaagaaatgatacatgtttgaggtgatggatatgctaattaccctgatgggatcataatatgttgtgtacacatattaaaatatcactctgtatcccataaatatgtacaattatgtgtcaactaaaaataaaaggaaaaaagagaaatagttggccataaggctttttggaagaaaaatgtttaataattatttttaaaacaatttcaaataatggcaacttcctactactgttgtcttccatttaaaaatacactatttatgttaattttttaaaggagaatctttttttaatcacttatatacaaatggcaatgtgaagtctattttgagattcataaatgactttactatgtgccattgcctttttcttttattcctgttttggagtgagtcttaatttattaattcagaatacatgcatcagggtaggaaagggctcagaacactgtattgtattggtctgttctggctgctataacaaaataccacagactaagtggcttaaccaacagacttttctcaaagttctggagactgggaagtccaagatcaaggtgctggcagatttgattcttagcgagggccctcttaccggcttgcagacacctttgtactgtgacttcagtagagggatagaactgtggtgcttttcctccttcctttagagatattaatcttatcaagggagtcccactctcacaatcccatctaaccctaatcacctcccaaaggtcccaccttcaagtacggtcacaatgggggctagggcttcaacatacgggttttggtgggacagaaacatttagttcataacgactatgatgccaggtgaaataagccaggcactgaaagacaaatcctgcatattctcacttttatgtggaatctaaaatacttgaactcctagaagcagaaagtagaatggtggttacagaggctggagggtgggaggaatggcaaggtgatagtcaaagagttcaaaatctctaaacgggaggaatactttttttgagatctagtgcacagtgtggtgaagatagtatatagtgcacttcaaaattgctaagagtaaatttcaaatgttctcgccacgaaaaagtaaatatttgaggtaatggatatattatttagattgatttaattattccacattgtattcataaattatggcaattctgtaccccataaatatatgcaaccataaattgtcaacttccaataagaattttttaaaaattaacttaaaaaatagttatagcttgtctaatttgaaaaagaggacttttggtgacttaattaaattattacttccctttgtaagtgtaagcatttagcttcaaatgaactttgcattttttactttgtggtttttacattgacattgcattagagtgttcaaagtatcattttatacttcatttcctatgatccccccattgccctttgacattactagaacaagtatttttattttcatttcaccaaggtggaaatcaaggttgagttacttaaaagtactcccgaaggtcacaccacgaaataaatgaaagaggtctgactttcactcgggtcatttgactcagatcattccaaaattataaaacagtccattccaatgtctagtaagctattagttgagcagaggacaggctaatttaattataatggatgaagggaaagtaacatgaaatgaaccctagaattaactggaacctgatttcttatcaataaaggaaatttcatctttcatctggcaagttaatcataaatgcaacttagttgaataggaataagatatttatgattttcatacgcaattaagtaagaaaacaagcaactcattagcagagaaaaataagttgtatgtaagtattcatagaaggcatttggatctacttaaaatatgacattcaaatgggtgaaattcaaactattattaatgtgtagaaaatgttttggttttccaattctttaaattgcatggagacagccttccaaaagcaaagccaatagagaaaacagaaccaagagatgaagaaagagagacatcatgtgaattccaactggacaataactcaatctttggattttctattccatgagtgattgcatctcctttttggtctaccctagtttgagttgggtttctgtcatttgcaacctaggagtcaccatcaccatcatcatcgctatcatcatcatcatcatcgtgagccatagattccatcatctatgcacatttcattatctatggatgattccattcatcatcatgaatgttgagccatagattccatcagagatagtaaagggggccttgaaatattctgaggcttgtaaaagggtaaagtaaatacctaaagtaattgtgatggatagtgcttgaagtatctgctttcaagtaccatctatcaggctgtggtgagcccaagtaattgaaactcctaatagcttactagacattggaatgggctgcttataattttggaatgacctgagtcaaatgaaagtggtttctgctcactttttaaactttaaaaaaaacctttggctacatcactccttttgattttgtaattttccattcttttgcaaccatgttcttttttggtaatgcatgttttatagaactttcaaaaatagttttaacaattaataaggaacacgtgttcttaagatcttcctcaccattgaaagagaagatgtctttaaaaaaaatccactatggtaccaaaacatattgacagaaagtatgaaaaggaaaaggctgaaaatattggaagccactctgaacttggtagaggggaaaatgaagtgtctgtaggaaaaaagcatgaatacttagctgtgtgattcattccttcctagtaatattttctcatttctgtgatctctagaaaacatgtagaatagcacactgaataaagtgattcctgctaagttttgaactgtgatattcttgtctcatagaaagaatataaaaaagatttggaaaatgagataaaagggaaaggaatggaacttaattcagaagttcttgatatccaaagagcaaagcgagcctctgaaatggcaagtgaggtgagtatgtttatttaacaccttagatgaatatgtttttagctgactttcttatttgtcaatctttctcaaaggttctatacatctataacttttatatgtaagtgattgtaaacagctatatccttgtagtcttttcttggactattaattttttttaaaatcccctttctatgtgatgtgaaaaaaatggccgtttccccactttggagaaaatccatataataaacgaaaatagtttaatgagatttaacttcatcttttaagcaggtaaaaggcagatgattgggaaggtatgttattatggtccatcagtaactgcaggtagaaagttcacatgctttgccactcataacccaactgactctcccagtcttgccctgggctgctgtttgaaccttattcagcctctttatcaaatgaaagtggtttctgctcacttttcatgcactttataaggagaactgaaatgtctctgaagtgttttcagtcctgtaatccttgtattatgtcattactttgggtcatatggtgtcactgtgcttttaagagactttggctgaatttagcagtgaaagagcttaaagccttgtccccatattttgaaactctgatgataatgatgatgatgatagcgatgacgatggtgatggtgactcttaggttacaaatgacagaaacccaactcaaactagggtaggcatcaaaggagatgtcttcactcatggaatagaaaatccgaagattgagttactgtcaaggtagaattcagatgatgtctctcttcctccatctcttggttctgttatcttcactattggctttgcttctggaaggctgtctccatgcaatgaacccacttaataaaaggataactcatatctatggccagtaatcccaatgggaagtgaacatccctttttatagttccaatcaaagtcttaggtttgaatctccttggattaatctctatcctgtgcttacacctggcataatcattgtgtctgggattgggggagtagaatgtgctgattatcctctcatggtcacccatttgttgaggtagtttaacagtgtcttatagaaaacattctaaatttttatgtgtttaaaacatgaccttaatctcagctatattcacattctttaaataaaggaaacatttaaaaggcactttagtagaattaaaaatatatgtggggactagggaggtgatggaaatcaatccttcccaagggtatggattgagagaacttagaggtcatttcccaaaaggaaatcatggagctttttgccagaaggaggaggaatggatgctggtcagccataaacaacacgtgcccctggtgaggtctgtggctaacattgtcatcacattaaccctacattagtcattttctgcaaattcttctgttgccgtgacatgtccaatccacatgcagagattgtcttgtaattacttgtcagtagcatgtgtaaaagttgttttattctctcaatggcaaagtacagacagatgcagttgaatggcaggatggcggcaggagcagcattaattaggccttattaggagaaggaagaaccggcctaggagaataagattgaaaaactggaagaaggtgtcaggtgttgatcatctcctctgtgctatgcactgtcattgatcctcacaatggatcctacatggaggtacagacacactgtggagatactatgggttcggttccagaccactctaataaagcaaatatcacaataaagtgattcgcatgaactttttggtttctccatacatatacatgttatgtttataccatactgtagtctaagaagtatgcaataggcttatgttcaaaatacatccatatcttaatttaaagtactttatttataatagtgctaatgatcatctgatccttcagcaagtggtaatcttttcactggcggagggtcttgtctctatattgatggctgccgactgatcaggatggtggctgctgaaggttgggttgactgtggccattccttaaaataagatgacaatgaagtttgccacattaattgcctcttcctctcatgaaagatttctctgtagcatgtgatgttgttgatatattttacccacagtagaactttcaagattagagaccaacctctcaaacccattgctgctttaatgacaaagtttttgtagtatcctaaatcttttgttgttatttcaataatgatcacagcatcttcacaaggatttgatcttcagaaaccacattctttgcttgtccattggaagcaactccttatccattcaagtttgattatgagatggcagcagttcagtcacattttcaagttccacttctaattctagttctcttgctatttccactgcatctgcagttgcttcctccactgaagtcttgaacccctcaaagtcatccatgagagttgaaatcaacttcttccaaacttctattaatgttgatattttgtacttctctcatgaatcactaatcttcttaatggcatgtagagtggtgaatctttttcagaaggttttcaatttactttgcccagattcatcagaggaatcaccatctatgacaggtatagccctatgaaatgtatttcttaaataataagccttgaaagtaaaaattttccttgatccatgggctgcagaatggatgttgagtagcaggctcgaaaacatgaatatccttatacatttctatcagaactgtttggtgaccaggtgcattgtaactgaacattaatattttcaaggagtctttcttttatgaacattaggttttggcagtgggcttcaaatattcagtaaaccatactttaaacaaatgtgctgtcatccaggctttgttattccatttataaagcataggcagagtagatttagcataattcttaaagaccctaggatttccagaatggtaaatgagcattggctgcaacttaaagtcagcagctgtgttagaccctaataagagtcagcttgtcctttgaagaattgaagcagacattgacttctcctcactagctatggaagtcctagatggcatctttttccaatagaaggctggtttgtctgcatcaaaaatctgttgtttagtgtagctaccttcattaattatcttagctagatcttctgggtgacttgctgtggcttctccatcagcacttgctgcttcaccttgcactttcatatgatggagatggcttctttccttaaacctcatgaaccaacctctgctagtttccaacttttcttgtgcagcttcttcacctctctcagccttcacagaaatgaggagggttagggccttgttctggattaggtttggtttaaggggatgttgtgtctggaatgttttgtctggtttgacctattcagaccactaaaactttctctatatcagcaatagggttgtttcacattcttataattcatgtgttcactggggtagcactgttaatttccttcaagaacttttccttggcattcacaactcgaataactgtttggcacaagagtcctagctttgggcctgtgttggcttttgacatcctttcctcactaagctcagtcatttctagcttttgacttaaagcacgtctcttctgtttacttgaccatctaggggccattgtagggttactaatcggcccaatttcaatattgttttgacttagggaatagggaagcccaaagagagggaaagagatagaggaacggctgatcagtggagcagccagaacacacacaacatttctcgattaagttcactgacttataggggtgcatttggtggcatctcccaacaattacaatagtgttgcaggacttcttcttggttcagctaaagacagggtccttgtcccatggccatgaaaatttaggcttgcagagagtttgaagggtgagtaaagcagagttttattgggtgtaaaggaagaaaagggggaaacagggactctctgcaaggccagagtccctgctagagtgcttcccacctcacagtttgaatcccaggttccacacaggaataggagaggccaggctcctccctcttgcaaactgccggaacttctgtggctccaccccagcgcatgctcttcccagtgcacaggccagttggagttttgccagtgaccccctcctatctgtctgtctcaatagtaacatcaaagatcactgattggccagatgcggtggctcacacctgtaatcccagcattttgggaggccgaggtgggtggatcacctgaggtcaggagttcgtgaccggcctggccaacgtggtgaaacctggtctctactaaaaatacaaaaattagctggatgtggtggcgcatgcctgtagtcccagctattcgggaggctgaggctggagaatcgcttgaacccaggaggcacaagttgcagtgagccgagatcacgccactgcactccagcctgcgcgagagagcaagactctgtcaaaacaaaaaaatcactgatcacaaagcaccataacagtttgaaatattgtattaccaaaatgtgacaccgagacaccatgtaagcacatactgttggaaaaatagcaccgataggcttgcttgacaagcagagttgccacaaaccttcagtttgtaaaaaaaaatgcaatatctacaaagcacaataaaaatgaggtatgcttgcattactaccttcattttgcagatgagtaaactggaaaggttaagaattctcagtgtcatacagctggtgaatgctctggcttctaagttcatctgttttgtacaacagcagctcatttacacccacctccctatcctccagccccaaagaaaattgtcagtgaagattttcacatggcaattgcctttgtatactaaacatttttggagctttgcatgcccttcttcagtgagaatgagattatcattctaagcagttcagaagttagttgtgagtgatcattcatagtactcaaggagctttgttacctcttttgtaaaatatgtctaactattttttttttagtatcattgactgcagatgcatgtttgcccactgagtgtttgaatgttgtaaaatgttgtcttttgcagaaagaatacaagaaagacctggagtcaataattaaagggaaaggaatgcaagctggcactgacacccttgaaatgcagcatgccaagaaggctgcagagatagcgagtgaggttagtagggtgcgtgatgcaggccttaagactcatattttggaacctaacaaatcgtattagcaacttgattactatatggaatttctcaaagcattgcagctggtttaacagtttggaatggagactattccgaagcattatgccagtttgaaaaattacagtttttgctttgctcatatccttccaatatatcaagaaagcttggtggaaggcattttaattgaacagacacacatgcacacatgcactcccctgcacaccttatttcagaatacaacagatttaatggtaatctaggctatgataaatgttttcatggtattttttaatggatcatgtgctgcttggcatatctgtatttccaaatttctgagcagaacttcatatatggacactttacatgagaacaatagtcattcctgtctgattgcatgttcttaaaatagcctttgttgacatgatcagcacgcatgaaatttctacacagtcagcattttggatggaggtctgatataacctgaacgaccatgttcattcatctgataacaccagttttttcttcatgggatacaggatattgatttagaagttttgtcttaaattctgtgacaggctgggtatcacatcacaaggttgtaggagtcagaccatatgcatatttttcaaaggaaataccctagaactttctctacacctcttgaacttccccagaaaatctgagaatataaaaggatcactggagtaaagaagctttgggatgtgatgattttataaaaagtgtatgtgaagaaaaaatcggggtgcaggtgaaggggtcctgttcacttatctcaaggttggttaggtgggggcttcagtggagtatcctgagacctgttgtgtgatctttgcacttaggaagagctgactcaggactgacaccttacaggaaatctggaaggccagaggtagctgcttagctgctagggaagttactgttgttttgaaaatgactgacatccccagagttaggcactggccagggaaatgggattgccatgattgaataagacaaaggaagtggagatggtataggtttcctgatcaataagtgttccattttgaagtggtggccaggggtggacggccaggagcatgaggaacttgaaaacctgctttatccctttcctacttctgttctcgtcctgagagatagtcattgttataagtttgttatggaaccttccaaatctattttgtgtttatatagataaacatacacatgtacacacagcgacttaaaaaaatcttaaatggggtcagaccccatttaagtggttgattgttttctcactttatattaaggatttttttccatgttccttcatataggtctacctcattcttatagaaaaattaagtgttctgtaacatggatgtgaatatgtgaccatttatcttttgttgtctgcaagggaaatgtataatgggatctcaacgttacaggccaaaactagaatccctaattttcccctaggttagctttccccaatcttcaaatggcgccaaccaaagcatagaagtcactttgattcctgtcatcagcatactttattgatgccacccccatagtggtggtctaaatccatctttcttgccaccctagtcctaagccactatctctatcctctagatcattgccatagcttcctaaccagaattctgctattattgccttcctagtagacattctttttttctttttttttttttttgagacggagtctcgctctgtcgcccaggctggagtgcagtggtgcaatctcggctcactgcaagctctgcctccagggtcctagtagacattcttaacccagcaggagaagaatccttgaggcaattaaatgaaattttgttactctcctcacatgcaattctttaatggtttccagtcacatccagtgtaaattgattcacgtggctctggtgaagtctccactctcaggctgagaatcttagtcaataaaaaccccccaaataataataataaaaatctcatttgcatataatcatagtcatgtcccattttgcctaaatgacaggctcagatcattttcaaccaatgttcgggactttgccatagtttatttttaatatcaaaagtttatttttcaaataaagtcaatggatcttattgtgacacaaatgaccctcaagagtcaagccttcccatatctctgggcttgaccatgtgactttctttagccaatgagacatcagcaaatgtgactcagactataaacacacttctgcattagggtttgccctcttggaatgtagatgccgccatgttgttttaaacctgctaagttttggtgtgttttgttatgcagacaacaaataactgatgcaaagggtgtctaatgtagtctatgtgctttagaacacatttacatttgaaagttcatattaaaaaattgttacatccttttaccatcagaccttggtggctgtctgttatcagtgcctcagtttcatcatatttgttggccttcaaatgaaacatttcattttggggctttgaacaggctgactaaaacagagtgctttttgtagacatagtaataattgaatattaatattttgaaagttaaacataattatgtaaacttttatttagaaaagtgatactgggagtgtaagtcagtaaaaacaggaaggattatgagtggaagataggaggcaaaatactccaagactgagatttttgtttaccacttacctaaatttgaggatctcctaataagcaaatcaacatttactttgcagcagagaatctacaaatctggagtgtgtcagcataataagaaataattgttttaaagcaaatttaattggctatagttaatagttttttttaataacatttttctttgaagaataatatacatatagaaaaagcaaatttatatatgtacagctttctgaattttataatcagttttcaaatgtgacagaagtccctaaagacatgtgtgtctatgtaattatgactatcttgtaagcaattggtaatccatttcccactggcttaaaaaaaaaacagagataacttatttgttgttcttatgattgaatagtagagaaattcctaggcacggcttgatctaggactcaaataatgagatatagtttcagcttgcagttcttaggtagacattcttgtttgcaaagaggcttccagcagctcttatatggaaaaaaagatgcatgcatcccagaaccaattctgcagtgtgggtgatggggtataatgatttattgagtccagcagatcccagagacttgggccagtttctggatggtttaggagtggggaacattgacttgtccagtggcaaatcagagagccagtgaagggaataatgatttatttaagcccagctaagtccagagatttgagccagtctcaccgaagctggatggtttaggagtgggaacattgagttgtctagtggcaaattagggagccaatgaaggggaaaaaaggggtggattccagagaagcaaccaacacttattcactacagagtgaaaaacagcaattttacaatcactcttgactgacacttaactaagccatatatgacccaataatatatcaagtttatcatattgaaatgttaaattttccccttggctagctgtgttttttcttcttcttaattcagattagctgaaaaaaattgttctgattactggtgaataagttatactaagtcgtattcctaccacaagtaaaaactctattattctatagaaataaaagaaataaggattcaacttcattccaaaagacatggtcttaatgtcaaaatgacatctcgatttttgagcagtttctcaaatgattggagagcactaactgtatgtttcattttctgcagaaagactataaaagagatctggagactgaaattaaagggaaagggatgcaggtgagcacagacactcttgatgtccagagagctaagaaagcatccgagatggccagccaggtaagacagcagcaagatacaaagtttaaaataaatgccgtgaatcatagctggaaagagcataagttttctttccacatgggtggctttgagattcaaacatgtaaatttcaacatcgctattaaagcttaagcaaagctctaagattattttctgttcttttagaaacaatacaagaaggacttagaaaatgaaattaaagggaaaggaatgcaagtgagcatggatatcccagatatccttcgagccaagaggacatctgaaatctatagccaggttggtcatgaatgaagatgctcagaatcgtgtattccaatgtcatgttgccatgtgctttgtatgtctctatgaatgatatctttctgagggcattgcattcagagctagtgtactctttcactaagaaaccattggccaaacttgattaaccgtactaattaataggacaacagtcatagattcaatgcaacagacattatggagagctacagcctctctgtcggggctccttgttttgagtccaaggacattaaacctttttttttttttttttttttttaaattttagagatggaggtctcactctttcacccaggctggaatgcagtggcaccatcatagcttgctgcagcctcaaactcctgggctcaagcttatcttcctgcctcagtgggcatgagccattgtgcccagcccaaggatattttaaccttttctttctttctttttttttttttgaccctattggacacttggctcaaatgcttttgctaatactacagaaaaataaattacaaacgttttgtcttttaaccatttcataatgaatattaatattaaaatagttccaaataaagctaacagtggctaaagctgcacaaggtataaagtgaagtttagtgttaggtaaaaattaagggaacagtgaggttttcttggtaaaatttagatttgtcaaatatacttgtcccatattctgtaaacaaagctggatgtgggagaagtagtgaccacaaaaatttatggaagaagaatttatttataaaatctgacttgggcaaaaacattcattagcaaataatatctttgctgtaacatttactaaaaaagaatgactcccaatggaaaaaaatagaaggaatgaaaaaaatgaaaatggttatttaaaattgaccatagcatttaatttgattaatggagtttatgcagaaaggattgtgtaacaacatttggtgaaatttgttaaaattctgattaagacataagcaaggacattaaccatccactagttcaaaagggtagtatcaagatggcagagtcaaatgtcagaggacttgtgtgcctctcagcctccgcagccgacacagccgctgggatgatcctgaagtgtgtgttctgttctcagtgttcgtgaacttggagacattggcttggccatatcagcttaactaaaatcctaagtcaatgcattaaacaacaaatagacatttgagtcagtggagaagagttacttactctctcaagaatgccaaattcattccttcagtaggtaaatacctcctgagcacccatttgcaggcaaaactagacatggctttgctcttggaaagctacagataaatctaataatcatgtaaatatagtattacaaccatgatatatacacctgaaagtaaaagtattgagagtgaaggtgcctgagctgtcagatttcctgcattaactcaacagcatagatttttttttagtgtggtgtgagaatatatctaattttaagggattttaatcactgaaatacaattgggatacttacgagggtgtaatgaagcctggtgcatttcaacatgaatagtagttacctttctttttttttaattttattattattatactttaagtttcagggtacatgtgtacaatgtgcaggttagttacatatgtatacatgtgctatgctggtgcgctgcacccactaactcgtcatctagcattaggtatatctcctaatgctatccctcccccctccccctaccccacaacagtccccagagtgtgatgttccccttcctgtgtccatgtgttctcattgttcaattcccacctatgagtgagaatatgcagtgtttggttttttgttcttgcaatagtttactgagaatgatgatttccaatttcatccatgtccctacaaaggacatgaactcatcattttttatggctgcatagtattccatggtgtatatgtgccacattttcttaagtagtttgccagaataattaacttcactgattttggaatcagagagcctggttttaagttgaggctctgatacttactatctagtacttcagtttctccatctgtaagatggaaataataatagtatctgcttgtcaggttgattaaatgagttagtgtgtgttaagtatttagaacaatacccattacatagtaagtacaatgtaagtgctggtactaggataagatattgcctgggttgtattagagctcatagtagctcatttagtggagagaaaattaagattttaatctcaacttcaaaatactgttaactttcccttaatcaaatctatcttcacatgaagtaggaagcaaagcgtaaatctagaagccatgtcgtatggtagagatcgaagaatggtatcattctatctctgtctctccacctctctctctctctctctgggagtgtaagtcagtaaaaacagttttttactctctctctctcccttcctcctttcctgcctccctccctccctctcacatgtgcgcacacacatagtttcagatttatattaactgtttatgtttttagagaaagtataaagatgaagcagagaagatgctttctaactattctaccatagcagatactcctgaaattcagagaattaagacaactcaacaaaacattagtgcggtgagtagccattacttcttttaagttgccaccttgaaattttgttttgtaagaaatggtcttttttcctcattgtctgatgttttctgctgtcttagttgaattttctgtcaagtgtattatctttatttctttaaaataataagaatactgataatttttacaaattatcatttttcattatttttttggaattacaaattcaaaatttcctcttcggtataaatgacagttattaactaaattttaaaatttaactcaggaaagaagtctgtcttctacacagattttactttgaaggtgaaaatagtcatatgaagtgattttattcctggttattgattgtttttactgataatatgtctaaccatttactcattcttaataaatttctaaacttctatatttttattttgaggaagaggaattgcatcagcacttttttttttaacttttattttaagtttgggggtacctgtgcaggtttttacataggtaaacttgtgtcataggggtttgttgtacgattattttgtcacgcaggtgttaagcctagtacccattagttattttttctgatcctctccctcccctccttcttcaccctctgataggcccctgtgtgtgttgttcgcctctgtgtgtccatgtgttctcatcatttagctcccacttataagtgagaaaatgcggtatttggttttctgttcctgcattagtttgctaagtataatggcatctagctccatccatgtccctgcaaaggccatgatctcattcttttttatgactgcatggtattctgtggtgtatatgtaccacattttctttatccagtctatcattgatgggcattcaggttgattccatgtctttcctattgtaaatagtgcatcagcactattaattaagaggctgagtccattaataaatgtataaacttgacttctgttctaaaattgtaaaaattgaccatacaactaatattttaacatagaattagctcagtcattaatagttaaggaagcatctcatcaaaatataaattctagtaagtgtgaggacttctggaatatttcctacctcctaattagttggcaagcgccagctctcagagtaagctggtcagatgtctgctgggtctccacagggatggccaggctgtactgagaaatgggaaagtcttgatggaaggatgaggaaaagaggctgtgtgattctatagtgttctgtagttctagcctttggaggaaaacatctctcctaccgtgctctcccacccacgcgggggccactggattaccaaatgtcaagaaagggagtaattctatcctcatttacctttcttataattactctgtttttctgcagagtactcataacgagggcactcataaatactcttgtgtttttgttctgctttgggtttggaagggtagacgttagtaggggtggagacacatgggagagggttaacaaataagtggaagatgaagaagatagacttgaaattaacattgatattgatgatgagctaacattttcttggaagagaatgtgggcatccttgtgtttggagcatagaagttgcctaaaatgtcattttctttttgaattcagtgataacggcttaatgggcttttgtaatatctgctttttctcaaatacacatgggacatatatttatatttgaagaaaggaactctggtttgccaatgtgtattcttaaagcaaataatctgcagtcagccatggtagtggtctagacctagagcaggagagggttatttgtgagattatgggatataaaaccaaagttttcatggattatctgaatggattatttaatttgttcctataattccggcactcataaatagatgcagtattcatattattataaaacctgagaaattgtctttctaagaagcggatctaggacttgaattctgacaagcttagttattcttttccttttcttataataaaggtattttataagaaagaagtgggagctggcactgcagtgaaagatagcccagagatcgaacgagtgaagaaaaatcagcagaatattagttcagtaagttctctacagcattaattatcttttctaaaagcaaaccaaaactatagacaaatgtttttagttctttactcaactgatggcttttttccttttattcttcactttattgaaatgctatttcatcatatatcaaagatctaactttcagaacaaaaactgtatccttgttccccttgactctgaagcagtgtttcattttgatatatcacaatgaagaagagctaggtcattttaatgaaacctagggttagatttcatctctttgaagagaattttaactctattaaattttgcagagaaaggatacatttcagtacctctccacaagttggaagaaagaaatttttccctgatacaatgattaaaggccccagaacatttatttggcagcttaagtgaaggattagatttgaaaaggcaaatagtaccagttcatttttaaccgatgtcagtcacatctctaagctttttatcagacacgcttctgcccatttcttctttccagcctgttttaccttctgcttcttccagcagaaacgaaaacaaatcacacatcttcactataaattgtgaaataacttagcttccagtaacctttagactggggggaggggtcctcttctgttggaagggtccttctaacattaaggtgcttaatattacggataaattgttttttccattgagtgtttgacatttgctgtggataattgctctccttaccaatttgatattctcccatgtatatttagtacattgagtttcttttttttttttgagacagagtcttgctttgttgcctaggctggagtgcagtggcgtaatctcagctcaccgcaactgcctcccagattcaagtgattcttctgtctcagcctcccgagtagctgggattacaggcacacaccaccacacctggccatttatttttattgtttttatttttagtagagatggggtttcaccatgtcggccaggctggtctcaaacacctgacctcaagtgatcctcccgcttcagcctcccaaagtgctgggattacaggcataagctactgtgcctttccgttacatttagtttcttgaggaagtaaaaaggattcgttctttaaatcccttactctgacttatcttttcaccttatccttggaaagagcaccttccctttaagtaatccaagcagaattgccttgattagactcatctgtgggtcacttggtcattatgcagcatccagagaatatcagtgtgggtcagcgtttgtgaagaaagtgtaggagaggtaagagaatgcaatagtaaagtatacttcaaaataaaagcataaaaagtctacagaatatgagtgcaataaaacctctgtagcaccatggagctgtctcttgaataaagtgtaaggaggacctaggcttaaggtgtggatgagagtggatgaatgtgttcttctgatctttcatggtgagagcctgtgttagcctggtagatgaattaggttgggagagaagtataaaatattcattgcttctctttccaatgataatatttaaaatgcacccatcgatgtactgtggtttaatattataaatattctgtagtgtgcaattctatagactacagtgaaataactgtgccattttgattagagtccctttgaaaaacaaaagtgttcatctttaatcatgttaagcttcttacctgaggaaaatcccagagtattacagtatatcatttcttctcttagcatcccacagcctcttctagcaaacaataaatgcatagttctgtatctgcatgaggttgggccataaactcctgcttagtattcaaatggaaagttgcccttttaagattagctagatctgtcaaaccaagatatgattctctaacatttaaagatctcgacattttccacctccagagtacaagccttttagctgttagctctctgtcttaagaactatttttgaattttatttagaggtagcctgtctcagtgaacttccaatttaactgttttgggtctggactaatattggcattgttacttacatgaaatccacagatactaagacatagatgatatctgagatatttaggtactgtttctttatgacagtctgcatggttttcacccttaatcattttaaacattaccaggtgatttctgaaacatgtttcatgtagatttagatatttactaaatttcaacacggcctcttaagttgagcctatgctttcatatacttacatatatatgtatccttttcattcaaggaagattgaatttgaattatcttccatgaattttagacatattaaaataccacctgaattgatagtatcactaatcattttatgagttcaaagaactctttcttgtcccgtgcataactgtatgcttgtattaccatttgcctgattgatcttcctctaaatatatgtgatgggggagattttgagtgaagtagaagccaggataaaggtgagcttttcctaatgtgattgtgtggatagcagacatctctgacttcctggcgctgaccttccttatactgatgcaggacccagtggtctatgcttttagtacatttccttccatctccctttttctcttcttttattgtgctcactttatttttttccttattctataaggaattccttatttccttatttatttccttattatttatgtgctctcagtcagacaagcagtgctccccagactctgtggctaaatcaatttgacttttgcctttaaatacttgttaaattttaattaccatattaatagaaactgatttttggatagaaaataatcattttatttacgataatgtacaaggtttttttcctgcatctgcctaatgataaaatttatttttataagcaacatttgcttattttacttaaaaaactcctatagtgatgaataagtgaatagatacggatttatttgtaccttaggaataaggaatcctgaaagcatcatataaaattaagaattatgtccccagtgaaggaaaagtaatgttggaattaataaaattcaattatgcaatagttacaattgaagaattctcaatattttaaagccttgcatagaataaagttaacgttatattcttataaattatgcaggtgaaatacaaagaagagattaaacatgcaacagccatttctgatcctccagaactaaagagagttaaagaaaaccagaagaacatcagcaatgtgatcatatttcttaagtattttttaaaaattttattgtatatcaacacgtaatgacagcataaaacctgtacaggtcaaatgccatcacaatgaacctcattgcgagaggatcggttccttaaaagtggagctagcattttacacatctgtatgccctccatgacacctagcctaatgccttgtgtcagcatttatttattaaagacacatattattcagacatacagagtggaatcatagacattggagactccaaaaggtaggagggtgagagcaggatgagaggtgaaatattgttgggtacaatgtacactatctagggtaatggttacactaaaagcccagacatcgccactatgcaatatgtctatgtaacacaactgttcttgtacctttgaatctataataattaaaaaggaatgaaacctattttcagaaacatatattgatattttcttttttgttttgtcatttattttgttttgtagacatatatacgtatctatagtctctatatatctatatatctatagtctctatatatctatatatagcctatattagatagtctgtatatctctatatagtctatattagtttatatatagtctatattagatagtctgtatatatctctatatagtctttctatatctagttagactactacctatctatatagacatatggactatctatatattagtctacaaagcaaaacaaatcacaaaaaagaacattttctatttcttttatctatacctatttctgaaaataggtatagatatctatgaatatatatatttatgaaaataggtatagatatctatctatagatagacctatagatagatagatagataacatatatatatattagtctacaaaacaaaacaagtgacaaaactaaacatgaaatgtgttattgaatgtcttctctgttcttgttcttgggggattttaaagatgagaggtatgccctgagattaggggtcgtgggcatcctcaaggtttgtaggagaaacagagataggagtatatagctatgttcactgtttaagttccattacaataactgttatttgttgggtgcttactatgcattttgggtactttacattgcaatatctcatttaatcataagtaataatgcctcttgcaaagtgctgtgcaaacgcagaaggacggctatgcagtggcagagacaaagagccttggggaaggggtaacgttggagttagatcttgaaaaggtaataaaggtttagagctgagttttgtgaggaaaggcattcctggcagagcaaaccaaatatgttcaagatccaaggcttgttccaggattcaagaagagggtttagtgtgatgagtacttggggtgaaagatggcaggagcgtatgctggagagggaagttgagatacagatcacaaaaaggtagtatggattcccacagtgtctctaaagtgtggttcatataccattatggcattccggtagatattatgtggcttactgacaatcttaatgtttaagagcagttgacttcgtgattaaattgttctaatgtttaccttcttccaaaagaagggtgactagttttcaattgatggtagaaatataacaatctcttagaaataactttatttgaaaataaacagtgaattaatttaatgaaaaagtataacattgtaggtgttatttgtagtatttatctggtatgacatagagaaaggggcatgcaaatggcagaaatttgggaaatttggataacactcaagtggtggaaaagaacatgaaccctggatcctggactgttggatgatttgatcctaactccagatcttacttgttgtataattgttgtaagccattcacctcttgaaacctaaatttcctctatataaagcaaggataagagtattgaagagatattgcttgtgaagcacacagcatgtttgtgaagggatgaatacaagatgtgaagattctatcaaacttatgcacccaaacttacatccactagaaattggcagtaagagtttctctttgtcaataatgtgaatttactattcagatgtaacccctttgagctttagccagagtgatttctttcaagcttgatacagattaaactgaaacattcctccctttagctcaatcacccggtcacaagaatctgcgtaacatctcaaactacataccatggcacacagaaagttacatatcgaggaaagaggccagaggaaccttaccccttttcatttattttttaaacttattcaacttcccttcactctcatgttcactactaagagtatgcatcttaagtctatttctttttcttttctttctttcttttttatttttgttttgttttttgagatagagtcttactctgtcacccaggctggagtgcagtggcgtgatctcagttcactgcaacctctacctcctgggttcaagcaattctcctgcctcagcctcctgagtagctgggattacagatgcaaaccaccatgcctggctcattttgtatatttagtagagatgaggtttcaccatgttggtcaggctggtctcgaactcatgacctcagttgatccacctgcctcggccttccaaactgttaggattacaggcgtgagccaccaaacccgacctcaagtctgtttcatcagcaggccctgcaggtcttgtggggatttcttgtaaaagaaaattccctaacctgagctttaaagtctaaaaagacactaaaactgtccctgtgaagtttcttctaatgagatcttaacctccagctctacttttgtctgccaaaagttcatttgccattctgattttctctattgatgctcatttattttgggaggtgttgtggaattgttgggaaagatgaccacaaacaatggagttagatccccagctaagaaaaacacctctgtgcattaagtcaggaaaatttctataatgctaggtcagagatggggcttccaatgttagaacggcatagagaagaacctttgaagttcaaggtttctttatacagtaatagtctatcactaaagttcaggtacaggattttgttactctccttcccaatgataagaatgtagaattattatttttaaatataaaatggcaatttgataaatgttgctttagtgctatgaagaaatgaattcatagaattcattcttactgatgaggggattattcattattactgataagatcaaactcagagaggccaccaataaataatataatctgaaggaaaacaacaaaaagtgtgacttaaaacatttgataagggttgggtgtggtggctcacacctgtaatcccagcactttgggaggccgagtcgggaggatcgctggagcttgggaggttgaggctgcagtgagctgtgatgacgccactgcactccagcctggacaacggagcaagaccttgtctcaaaaataaaacaacaacaacaacaacaaaaccacttgacaaggaaaagactggcatcgccaagaagataaaatctataagcaatacatatttcactatgaaatcctgatgatgatcttattaatgaatgttctgtagccatgtgacatttaaaaaaaatctgttgcaatgttttgggacgtatttatttcccataatctcaaactgtcttgcaccttgtctctcagctccagtataaagagcaaaactacaaggccactccggtaagcatgaccccggagatagagagagtgaggcgaaaccaggagcagctgagtgcggcaagtcgtttctgtttccttttatattttctcaaacataacatatttttatttaaaaatatgccctttggaaggccattatccttagcaaactaacacaggaacgtaaaaccaaatactgcataataatgagagctaaatgatgagaatacatggacacatagaggggaataacagacaccggagcctgttggacgggagaggatgggaggagggagaggatccggaaaagtaactgttgagtactgggcttaatgccggggtgatgaagtcatctgtacaacaaactcccataacacaagttcacctgtgtaacaaacctgcacatgtaccgctgaacttaaaagttttaaaagaaaatgaatttgagcaacatgcaattatatggatgaatcatatcattataacatgaaaaagtgaatatgtacatgcagcattaattcttttgtaaaatttaacaactgcaataataacgatgatgataaacggaatatctccagatttaataaaactatctaaaaatttaaaaaggaaaagttttacaccctctgcatttttggatgttccttttcacatttccttgttgaagggcatgaactgcgtgtccaggaaatttgggactgtgttgctgtaccttagctgtgtttgcttattcaagagatcttcattaagtacccaaatgtactgggcattgtcctggtcacccagacacaaagatgggtaagacccactttctatcctcaaggacctcatagttcagttggtaaatctctttaaaaaaatgcagttaatggagaatactggatctgatgtcaatatgaaaagaaaaatatatatatattggaacagggcaaaagaagacctggcttgactggcattctaagacatagtatcaagtcaaagagccttataaatggaaaacatttttcagtcattcaatagtctgttgtgaataaagcaaaaatagttaacaaggcagcgctactctgtgctgggccctgtactaatgttctatgtaaacccatgaggtcagcactgtttgtttctctggttggtagatgtgggaaactgagtcttggggaggtcagaggacatgctggcctcccacccccagcccccccacccagctagtaaaggcagagctgagattggaacatattgttgaactttcaccaatacaaacaaaagccttctttttccaaaacaagtacctttgaaagacttcaaaatgtaagagtaggttctcctgggtggagataatgaggctcaacactgtttatccttataatatccctgggaggtggtaggagtcagagagctttagcttctattgaagggagaagccccacggtcagaagacagtaaaaagccttctagggtgacagggaatggacttcacaagagttctcttgtaatgacttcattctggcgtttcttttaaagcatgttgccttatgattccattacttttatttgtggaatttatggttaattttgatattgaagaggaaagcatttattgaagacatatttaaacagtaccagcaacaacttgtgcttgctaaatcagacccatcggaatgtgggcgtatatgtaagcgtgaaggttgatgtaatcaactgtggaaaaaaatgtgtaaaaagatggtgctaattttgagccttgtcctttgtggtatttcagtggagcccattgtgctatctgttaaagttcttatttatccttcttaggtaaaatataagggagaacttcaacggggaactgcaatttctgatccaccagagctgaagagggcaaaagaaaaccagaaaaacatcagcaatgtgtgatcatcttagtaacttttttcttacactatcaaatgcattgtccacgtgtgaatgaagggattgtatttatagaattttcataaccttgagctgatgtcctgttctcatttgactaacaacttatttgaaagatttcggggactttggtattgtgggtacagtcaggtgttccccacctcagggttcccagtgactcatcaggatgacttttttctttttgtttttttgagacagggtcttgctctgtcacccagactggaatgcagtggcacaatcttgactcactgcaacctttgccttctgggttcaagtgatcctcccagctcaacctcccaagcagctgggattacaggcacatgctgccacacctggctaatttttgtattttttgtagagacggggtttgggctggtctcaaactcctgagctcatgcaatccggccaccttggcctcccaaagtgctgggattacagatgtgtgccaccgggcctgggtgactttttttgacaggttgttgtgtatcccttctatcttgtcatctagctgatgggtgctatggtctcctcaagtcccacagtcgtagcttctggcatcctggccctacaaacaaacattttccctcccttttctaccagcatgtgttcctgttcttgcgcttcctccgagccccactttccacttcccacaatcatgactccatttttgggcaaagtctaggaagaaatgataatgtgtgcatggctgaataggttatattggacaggaccattttgggggcacttaataaggggctggcagtttttacctagacaccaacttgtggcctgctccgattccctgttgttgaaataattcacggatgcagttcaagaagaaagtcctcttttacagtcattaacatatagattgggttctttggaagaggaaacttggaaatctattacgttcaaagaaatcttttattcttcacacctttaaagtcattttaccagtttataatgcaaaggcaggtgattgatacttttcctaacaactatattttagagaagtagacgctcatctttcccccatatatttagagtcatacttgatgtgactccattattctcaaaaaggaacatggttatttagacaaggagtggaccagtgagaagcatgctggctttttaaaggatgcccacagtcacctatttaaacacatctttacaaaaattctgccgcagttaattcctaagaaaccacgaccatgtagtaccagtctacggtgaatacctttaagtaatctccatgaagacatttattctcatttccttttgtggttaaatatttattacagctttacggatggtatgcctatgtattcgagtacatccacagtgatttggacacatgtactctcttatgggatgaaatgaaatagattgatttaagatgccagcattttaaatacaactcaacctctgaaaatattttttgtagtttcctacaaaacttccctgactaactcattaaaataaatactgtgagccaggcactgtggctcaggattgtcatcccagcactttgggaggctgaggtgggtggatcacttgagcccaggagtttcaggtcagcttggacaacatggcaaaactcaatctctacaaaaatacaaaaattagccaggcatggtggcaggtgcctgtaatcccagctacctgggaggctgaggtgggaggattgcctgagcctgggagatcgaggctgtggtgagcaaagattgtaccactgcacttcagcctgggtgacagagcaagaccctgtcttaaataaataaataagtctctttgttgaattgattcatagtattctattttttgttctctgaaatgataggtttattacagaggtcagctgggaagagctaccactttaagtgtaactcctgaaatggaaagagtgaagaagaatcaagaaaatattagctcggcaagtggttttcttcattttagactatcacaaaggatgtgtcttttattatttacttgcggtcctcctttgcttgtgaaaataaaacttattttcaagaaacatttgtgatgtgtccaataagtacatgtgttatttcagatgacttccaaaagctgccactgcaaacatttacattattttgcaactctttgttatttccagatgtgaccaacagttacattcaaagcttaggttaaaattatattcatttaaacaacgattcatgatatgttagccgtgtctttgaaggtggtaaagcctttgatgtgtgcgttaaataattgtcattttcctgaaatatttcattgaacatggattgttaaatgctgtctgcaaaacaaaataggagatggatcattacccccactaaagacttacagaaaagaatccttaaatacagttaacgtagaattcagttgctcaccaaagtccagtggtgtacatgagtatcttatctgaatattgtgcttcctcttagtgaatatcagggcttcaattctgaattgtacataatgccctcaggtccacagtaagtggtatccatatcttacacctaatcagtttcataaatggcggtgttctgatgggcagttgtgaagaacacaggcccttttcttagcataccctgaatagctgtttgcctgagaatcagcatttaggctttgcaatttacagcttcctagtgacatttctgtccagagatgctgtgtgtatttaacataaattacctttaagttgtggctgcttagaagaacaactaaatttgttcctcattgtttcttattccctaagcagagaaaaaaataaaaagaaatagagtagcttgtatgcattttttaacactcttatggtagaaaattgggaaatttagaaacaaaataactttgggttctatttaatagttttggattttctctgtttaacttaaatatgataaccagttgtgtgtgtgtgtgtgtgtgtgtatgtgtgtatgtgtgtgtttgagacacagtctctgttgcccgggctggaatgcaatagcacaatcatagctcattgcagctttgaactcctgggctcaagcagctgtcttgtcttaacctctcaagtagctgggactacaggcacacgcccaactaatttttttttttttttaatttttacctgtagagatggggggtttcactgtgctgcccagcctagtctcaaatcccaggcctcaagtcatcctcccaccttagctttccaaagtgctgtgattacagatacgagtcctcgggcttgcgcaggtttacagactagatagatagttactattggtcattcacacatttgtttagagttgatagatttaggtcatttagcagtaggcggtggaggagatctttgattgtaaaattttaggttgctattctagaacaaaatttaattcactgaaatagttacctggaaaataatttcaagtatgttgcatatgtttcactcatttgtaaagcttaaaaatgttacatcatgtgttttcttatcattgtcttatgcctactatttactttgcaggtaaaatatacccaggaccataaacagatgaaaggtagaccaagtctgattttagatacacctgctatgagacatgttaaagaagcacaaaatcatatttcaatggtagggtccaaccagatcattcttaaaacatgctaaggaatgggcggatccagtgcacggatggcattacttcactattaatccgataactaacaaagcatggaaatgtggttggcttgtcttttgagggaggggcatttctaatcacactgaaatgcagtggaaacatttagtctaataaaatgatttttctcagtgactttttctggtgtgtctttatttctaacgtgactactgtaaactcatagtgtgaaagatatttgtgtagacttctttccaattaattctaagacaaaatttggtctgtttgcctgtcataaaggatatgaaaagaagtgtgtttttaaagctgtgtttttaaaaatgtgtgttttaaaaattatattatcagatgtaatttacctaccataaagtttgcccatttaaagtgttcaattcaatggtttctagtataatttacagttacacaactatctcctggacctaatttcaggacataaaaaaagtatattttgaagtataagtttttgtaattatattaaaagtggtatatattgttacctataaaatttcaaactgattttaaataatgccattttcatgaatgattgcctggaaatagatatcactttattgcatactgaagttgaagagataggaaatttaatttatatttaaattagtatattttaggaagtaaccaggatttgagaatatgtatttttacaagctctcattaataatatatatatagttttatatataatttaaaatagatatgagctataatgattaaaaactttgtgaaaatatcagcacttgatttctgatgctaagaaactgaagttccagactttagttttggagtatttggaaaagatacatacatgtagacaatctgcacgcagccagtgcagtgtacacctgtcatttaataaaaatgttgtgaaagaggtaactatccgcaaaattcagtatgatgatttttcctttttcaggtaaaataccatgaagattttgaaaaaacaaaggggagaggctttactcccgtcgtggacgatcctgtgacagagagagtgaggaagaacacccaggtggtcagcgatgctgcctataaaggggtccaccctcacatcgtggagatggacaggagacctggaatcattgttggtaagctgacggcgtttgtcggccggtgtgtgtggtcgaaaagatcatgcttgctctagcttcagaattaccctcttgagtcatctgactcctcatcacatgttggttgtggtacccaatttaaaatggaccgcaggtaaagtattatttttgtacgatgtggaatgggatttctggcattcacctggtatcatctcaagtcttttctattattggaagctctgtctttaataccttgctaattttaagaatgttcctccttgtatcacacaccagggcctgttgtgaggtggggggaggggggagggatagcattaggagatacacctaatgtaaatgacgagttaagggtgcagcacaccaacgtggcacatgtatacgtatgtaacaaacctgcatgttgtgcacatgtaccctagaacttcaagtataataataataaaaaaaagaatgttcctccttgttaagcaaagaagcagcagagatatgagtgatcacaatggttgaacaattactttgtttttctttaaaaagaaaaacaaaataattgtttttctgcttggttgacgtgttgttctgttgacctcatgtgcataagtggcagaaataaccatattgcgtttaggtccttttatcaaaaacagacacgccatgggcgttctgatggtactccataatagtaatagctcattttaaaaatattatttctggactggaatagttgagagccatctgaaagtcttgcaattaagagagcaaacttttattcctgctatctgttccttatagtcaggagaaatcctagaaggatatttgttgaatggtggctgagatatcagaaaagatcatactgaagtataaggcagggctaggaaggatgattattgatttttcagtctgtatcaacaactgaagactattgtctccttcagagcagttaacctctgaattatgtagttacgtagcttaaagaatatttttggtatatgccactcagtaatatcagtgttaggttttcttcatcttcaaaagtaggagcttattttttggtactagtgaaaggccatttagagataagctaaatttgacagggtaatgtctttacaaaaccagggtgctaaagtcagagcagcactaagtaacttggatgattatactaaagtgactctggaagtattttctgaagaaggattccaaacatgtttgtaggcaattgatagctttgctgatctgcctgagttgattacttaaaaggatcacattaagttggatggatgagttgtgatgttttcattcaatgtgacaccaaattagagtttcattgctttgtgctaaagggatggaactatcttaagggatagtgcaggggttctgatttatctcacttagggtggaactgctaaagtctgtacagcttacttccaggccctgcacacatcagaggtcaggaatgatggtgaggtcgttgctaaaaaccatgaaactgtctagaccgtgggctctcagaattcagtactcaaaaccattgaggttgaaattatgattgttttataaaatataagatgtatgactctaagttatttacttacttggcaatccagaagtcagtttatttgttcttattgggaagaactgttttccattgaaatttccataattggccaacattaaactttccaatgagccagcttctgtatcaggcatgaaaatacacgtttagagattttctgagtaattcagattaagccaatttgtgctgcttctatttttgttggaggctctgctacttcttacgagctgtgtaaccttggccaagctactcaatttctctgtgcctcagtttcctcatctacaaaatgaggataatatgtatgaaacttaaattaattaggtgttaaatgagaagagtgcctggcatatggtcagcactacataatattaattaaaaacagacaagcaaatttccagttccattttacaaattaattgtttttgctgtagccccatttctgccgtatgtctataactaggtttttcttttccagttgttggtacagctgtaaacagcttattttaggatctgatgcccttttgttggagagactggtgaattcagaagttattaaaataagaggagaataaagtggtttgcacagtctgatcactgactatggcagggatccattgacagcaggaagctgatattatttctcttttcattcatcatatttccttgctgtgtgccttgcttataacactttttaaataagtgtatctaataagatatgcattccctaagatacacttagcttgcactcacagactcagaatgaaaactaggcttgccaccattccacattttaaatattcatttctgttatagaaagggactttttttttgtttgttttgttttttaaacataaacttctcaattgtttcctatgaattactcacatgtcctgaatcagaaactataatcaaacattttgcttgtttcagcctgtggagagcaagagtgactggggattcaggggtgctgtgaggggatgcatatagctgccccatgtgctcctgtgttgtgtgatgggtcacaggtacttcagcaaggtctgatagggcagctcaatgaatagagcaggcaacttcaatctgattacaaagatttcttaacagatacttgtgaaagcaagtattttttcattctcttctgaagtcagcagcactgtgagtttgtctgttacatgtttgcttcttatatctattcctttgcagactttgtcttgactcttttgggtactggcttttttttttttttttccttttttaaattccttcttgatgagtgttgatttcttccttttggcaaaagacctcaaagtttggcgcacagatcctggctccatcttcgaccttgatcccctggaagacaatattcagtctagaagtctccatatgctctctggtattactcactttttagttcatcccatttatgtggttttgtcccaaaagtgaaccactgtgaactgtagaggttcattgtactgtgtaatgtaaattttaaagctgagaatttggcaaaccaaaaaaatgctatgctacttttaaatacaattagtcatttatgaaaagaaaactttttaatatatcttaattagtctgtcctagattcatttaaataagctttttattagtaagaatgcttttatattatttctgggtttacaaatacagttatttggattgcactaaagtgctgagacaaaaggaggtttgtttcatgaaatacattgttataattttttaaaggtagatttaaagaattatatatagaacagtagaaaggttttttacagggcatcatagatgtcttaaaataaattttcaagtatctttaaaattttctttgacattttatataatgtaaaatgaatagtttacatggcaagcatagttggcttttaacttagattgcaagttcataattaaaggcaaaaaaatgaatagttggggtacgaatgatggcttgatttgacatttcaaattttctctgacagttatgcagttatgttaaacaatagatagctatgtcatttagatcttgctctaacccctgatttctactctatatttaatttttgatgtgaatagaattgaatacccaaggcaaagcaggaattctagtacttttatagtcactttcattcatatagttagccaaacagtgtcacttgattttctaaaaataaagaaaaggcaacacatactatatatctggtgatagtttaaaggaattattgaaaaccaggcattacaattaacaaaaatttattaatttaccaatgttttctttgtccttgtcaatttcctatcccttacccgtcctttaaaattgagacttaaaagagcataaaacgatggttaagttattcatgtagttgatgcaatgcatgctgaagtttgggaataggtgcctagcgctgagattttgagttattctttactaagagatggtttttcttctctgttaagcttttaagtaattttttgttgattttgtttttcgagtcacttaatcacacgtgtaaatattttccctccaatatagaaaaggcgagtcactataggcgacactggtctcgatcccattccagcagtactttcggtacaggtctcggagacgacaggtcagaaatctccgagatttaccctagcttttcatgctgcagtgaggtaacaagaccgtctgatgaaggaggtatcaaacattcactgcttacaaagaaaatcgattcattttttaagtgtgtcacaagagtgtctttaaaattcttttcacttttgcatgaacatctatcctggctgtatttgagaatttaaaattaagttcagaaagttaatagtctttttttttttttaaagaaaaaaccctactaatttgcatttttgcatgttattttccccccgtcttacttcactattatcgcagcaatggatttgtaatgacaaaagggtcttgagacttgctgcttgagtctgtttcacaggagttatatgtgataaatatacacactacacagtcataggagaaacttgagttctgcatagtttttatatgatttccattaaggaaaaaaatcaatcttacagtaatattggggtacctcagaggttataatgaatgtgtatattttaaatattaatataaacttgcagacagagttagaccttgccaaaagaaattgggcataatacttgggatatgagagggtttttttttttttttaaatgagaaatactattgattgttaataatcttgtcactattttatatacccactcttttcctgtatcttctgttttctgtatccaggctgatggattaagcctagaacttcaatgaatttctttagggtattaaactaattttacttataaatctgtttttaaaggttaagactaaaatgtttcctcacctcattgcagttatattttagtacagcaaggagggggaaaggactgaagcatatgagaacaaaagcaatactgaatttccctttcaactcaaaggccatattgttgaaatcccaaaggtaggaaattttgaggttgagcaacttaacaccttggtgggtaaaaagtaatgtgactgaggaaatgaccaagctgcgaaagattgtataattgtgtaattagtttttctgcactcattacagtgaaacactaatgggaataaaatttattatattctatacatcttgaattgtaaaactggactgaccttattttggtagaaatttattaaaggtctcctttttgtgtaactaatgaaatcattataaactggttgttttattgtgggtaaaaatacatgagaaaatctcccctttttgtgtctgtctgaattgctaatgaagggttcagtaacttctgattacttttttgatagagtcttgctctgttgcccaggctggagtgcagtggcacaatctcagctcactgcagccttcacctcctgggttcaagtgattcttgtgcctcagccgcctgagtaggtgggtctacaggtgtgtgccaccacacctagctaatttttgtattttttatagagacgggggtctcgcaatgttgtccatgctggtctggaactcctgacctcaagtgatccacccacctcagcctcccaagtgcggggatcagaggcgtgagccactgtacctgacctctgattactttttttggacgtggggtcactgatttatgccctcagtgtccttcctggttctgtagatgcagaataatattgatatttaaagagataaataaaacccaaagcaaatacaagaactaatgttgatcaaccttatttaatgttactcagttcagcatactggaattgatgtctctcccaaaggcaatgtaccagagagtctttgtttcaagaatgaccctttacttcatgtctatcctcctcagtccatcattcattcatttagtcaccaaatgtttactgagtgctgtttgtgcactggccaagagcttagatctggcaatgcacacagcagtgagcaaaagaaacatgcatccgctgtaaggggcttagaggctggtggggggaccttgacatttagcagacacttaaacaagtaatacataatgaagagcagaatcaggcctgtgacggggtggaatgagggctacaataacagcgcagctgcatctggccttgatgtcagggaaaccttccttggggaggggatatttgagtagagatgtgaatgctgatggacgttaacgaggctgtggggctttgggagaaaaatgtttctgataggacagacgcatgcattggatagggcagaacattgagatgttcaaatggaagcatcacacacacaattagagtttagaagaggaggccgcacccgaggtcagtttggaaatcatccatccaagtctatgatttaggtcctaaatgaatctgtgtagagatcaggaattcggagggcctctgcttggatgcctctactccctctgcagcagcagaccatgcccacgtcacttgtctctttgcattctctcctccaaggctgtaaaaacctgctgctgttagttaatcacctctttttcttaagcccacattccttctcttttctaattatttctagcaagaggaccctatcctaagccaaattgaatgagaaaatgtctcattggaagaaggtataggcaaatattcttgcatttatactagaatttgagtaacacatggatgggtaagagggaataatcatatttttttttaaaggaggaatttcatacttcttcaaagatggagggagattttggacagcagcgatgactcagtgactcaaataatgccttgtaagaaaaagttgacttttttttttttttgagacggagtctcgctgtgtcactcagcctggagtgcagtaacgtgatcttggctcactgcaacctctgcctcccaggttcaaacggttctcctgcgtcagcctcctgagtagctgggattacaggtgcacgccaccacacttggctaatttttgtatttttagtagagatggggtttcaccgtgttggccaggctggtcttgaactccagatctcaagtgctccacttgcctccgcctcccaaaatgccaggattacagacatgagccactgtgcctggccaaaaagttgactctttggggtcatttataaatttctgttgttctcagtcctctgttttgaggccaagatgctctgtctttagggacattgcctattttaaaaaatagatattggggtatgaagcaaaagtcaagatgtaccaataagttgtataacataaacacaagtgacatgtgcccacaaaagagccatatgaatttgaaaagattttaggatacattggaatatgctaatttaatttaagtgaagcaaagcacattctaccaattggcacctgatgtcagtattcaaatgattagtgacatatatcaaaccttataagttcaataccacctctctgcttcccccttccctgcagaaatctcctttctgagcttcccagtttgctaagtgacaactacaactttccagctacttaaaccctttggagtcatccctgacgcttgtctttcactcataccccatgtctagttcattggcaaatcttgtcagctggaccatgacaaaaatatccagaatctgagtgcttggccctacctccattgttgctacccttatgtcagccactgtcatctctcatttggacaatgatagttgcctcctgactggtttgcctgcttctgctctggccacaccatcttccacccacctcctgctctgatctgttctccacctgacatctggaatgatcttcttgaaaccctggtgacatcatgtcactcttctatcattttattctgaatataacccaaattttcatcattgcgtacaagacccatatctgatcttgggccccggtcactgctctgaactaattttctgccattccaagtatatctgtccactctcaccatttctggtccccttgctttactcaaactttccaagaatgcttccccctagggcttttgcacacactgttcccccagcctggaatacttctgccaccccagatatttgcttagctaagtgccatttttctttatgtttcagtgggcctgcagcatattcagcattggagcccaagattaattctgattcaccctctcttaagtggaacggtgcttggttagtttctgctaatgttgaaataaatcatgttacagctagaggccataatggtagggttagtcatgtgaacctttgtgtagtgatgagggttgataaagcaaatgatccacttatcaagaaaactaacaggaggatgattgctaggggaactttgtatggaattgtttgggctactgcttgaagtgcgctaatgagtacatattttgaattgaatgtccagtgctcagatggtaccctctctaactactagagataaaatagcacccctttcctgactatctgtcccttttctctgaattttttccttcatagcacctggtaccacttcagatattatatattgatttatttatttgtctctctctgcatgcccaacaagatcagaggtactggctgttttgttgactgttgtatctctagctcttagaataggcattcagcaactatttggagagggaataaaatggccaaatgaatattttaaaaacaaggaccacatgcataaatatatataagtataattatttttataaaataaaattctcttggggaaggctttcaagaagattcttacatttttatgatgttttgatatgtttcaatgacattaaagcatagctgaaaaaatactctaaagtgaaaacattcccagtatgtgtgcatatatatatatatatatatatatatttttcgtacagaaggaaagaagtctccatgatttctcagtggctttgaaatttagggtcccctttgaaatgtgtgctctgctgggctctggtgagaaggtgctgattgactctataaaaagtggagtgatgaaaatcgttagtgcttttaacagtaacagtcaatcatatgcatttgtttaaattctatcctagaaattgaaaagaattttataacaatactagttaggggtaagatgaagaaatgtttataaatatttagaaacgctatttttcttctggatgttgttgattcttttaaatttatttacttttaaaaacaaaatgtagttaaaattttttggttcaagatcatcttctgagtaccactgctataatggactattttaaggattgatttttcttttttaatgtttcagtggataaataataattatacatatgcatgaggtaccaagggatgtttcgatatatacaccatatagtgatcagaacatggtaattagcatattcatcatcttgaacatttatcatttctttgtattgggaacattaaacatccttctagctatttgaaactgtataatatattcttgctaactatagtcatcctacagtggtatagaacactagaatttatttctcctgtctagctgtaatttacatgataaaatgtattatgtcccagaaagacgtcctttaatatttggttgcctgcttgtggtcgaggtggggtgtgtggcagtggtgtcctgcggtggccggaaccctgaactggaggacgagacattggacttaagtcccagtgctctcacgacttggtccgggttatcaaaggggtcatttaaccttattaggcttaaattttgcatctgtcataagaatggcgcagaacaagaagcagatattttacatttcctcagctaagtgccctaaataaactttttttctttcttttctttctatgtgtaagaatgtgtttatgttctgaaagtggtctgttttactttatgaatgaagtacttgggcagttatgagagtcacagttttcgttccttctttcgagtaagttctgattgttaggacaaagggttgaacaatcaactcatttcgttaaggcaaaagtacaaggttttcatcgttcacatttggttttcatgagcattaacagataagccttctcctttaagttttcatcatcattttggttatgtgttttccatgatattttcccatcttactttgattgttcagtattttcattttcctatgtgattattttggactttctttacttgtcaatctacttttcaatgtattaagttaccaaagggtttgcattttacatctctactgtgttactttgatttaagaacagaggcttttatttaacctctacccaattttgttttgattcatgaatagtattacttgaaattatctttactgccttttggtattagattcgcttaacttatattttatttgacacacagctcctttggtgaaaaggatcctgatgatttcagcttatttcactgtgaggtttcctttgatctttgtgtttgcctctagttcattgcctgcaatgtgtatctgcttcccggtattactttgtgtttctttggttttccttaacttgcagttttctggtattgaaagtattcgtatgtgcttgcaatctcacctggtgtttacctgccttgatttgaacttgtattcagttttgcttcaggtatgctatgtgtttctgttttcctccggaaaacgtaaaaggatatgggagtgtgatggggaatgaaaaacagatgcacttttcaaaataaatattttcagctttccaacctcgtggcctttcccattttgctgtgagagagtcttatggggatggcctagccctaccttaactgactgaaagtaagtttctgaattttgtagcagtttaacccaccctagccaggctatgcttccggcgtttcatcccatgtaatacgtattcaagagttgcaagagatgcttcagtacattctggaactctcagtttattgttcatagcatatatcaagagggcagtgcatcaactgtgcggccaattgccctggtgttttactggtacccataactccatctgctcagtcatcaaacatttatctagtatctcttgtatgtgtgagatactgggaacacaaaaataaaagaaacgggtactgtttttagagagctcacattctgttaggtgaaccagttgcataaaaccattgtgctcaggaaagcattgtgatgaagtattgcatagggttagaaatagccaagtagaggccaggtatggtaacttatgcctgtaattccagcactttgggaggcccaggcaagcaggttacttgaggtcaggagttcgagactagcctggccaacatggcaaaaaaccttctctactaaaaatacaaaaattagctggttgtaatcccagctactcaggaggctgaggcatgagaatcgcttgaacccaggaggtggaggttgcactgagctgagatcacaccactgcactccaacctgggtgacagagtaagaccctgcctcaaaagaaaataaaaaataaaaataaaaataaataaaatttaaagagagagagagagatagccaagtagagaaatgggaaaggaatgtactaggcagaaaaagggtagacgagagagagcatagcacgttggcaacttggtatagttcagcacatcttgaggctgtgtgtctagatgagctgaagaagaagtctggaactagagcacgggcagtgctgaaccccaatctctgcagagatagggctcaagggaacatggtcccagcacactttccttggattttatcctgtaggagacttaaacgctatttagaggaccagtgacctacacttgtaggtgagtggagtctcttccttggaggtttaatccattcctggagcttttctaagaatctggtctgcattgcgttgtttagatttttaccaagaaattgactcctcaggcatcaagagaccttctcagtggtccgctagagggattaatgatgtagaaatagtattggtagattttttttttcaaatatcgcaacctctcttattgtgagcatttgtcgtttatgcagaagagcagaaacactgaaattagataaccagaaaaacctattagaaaatacactcctagaaaaggaaactttagcacacagtgggaatgtagattggtagagccgttgtggaaaacagtatggaagttcctaaagaaattaaaatagaactaccatacaactcagcagttcctcttctggtatatacccaacccaaagtagatgaaaccaccaccctgtaaatatatctgtactcccatgttcattgcatttttatcgtaatagccaagatatggaaacaacttaaatgcccatcaaaggatgaatgggtaaagaaaatgtgtatatatacacatacaatggaatattgtttagcctttaaaaaggagaccctgccatttgccataatatgggtggaactagaggacattatactaagtgaaataagccagacatagaaagaaaaatattgcatgatcccacttatatgtggaatctgaaaaagaaaggtcaaatttacagagatagaaaataaaacaatggttacgatggggtggggggatggggagttgtaactcaaatgatacaaagtagcagatatgtaagataaacacatctagagatgtaacatatagcatgtggactgtagttaataaaattatgttagagatttttgttaagtagattgtagctgccctttgctcgctctctcacacgcgtgcgctctctctttctccgtctcacacacacacacacacacacacacgtgccagatggtaggtatgataatttgcttcactatagtaaccattttaccacgtatatgtatcccataccatcatgttgtaaacttcaaatatacatgagctttatttaagaagaagaaaatacactcctgatttagaactatgtatcttcatttaaaataaacttgctggtgtttctattttagccactgcttcggttttctgactactgattggtgacccttcaagatcactccccaatccaactccttgctagcctgacttctgtaaagaatgtgcattcagcaagagaatttcagaatttcagttgtacttcccaactatatttgagtgttatttgcaaactgaatttgaaaagttggtttaaatttgtcccaaaaatgctgttgtgtttacatttgtccaaaaaagtgctatcttcatttaagtttaggaagatatgaagaattgatgattgaaatactaaatgtctgtgatgaaccgggcacgcctgcaatcccagcactttgggaagcggaggtgggtggatcactagagtccaggagttcaagaccagcttggccaacatggtgagacctggtatctcctaaaaatacaaaaatgagctgagtgtggtggcacgtacctgtggtccccactacttaggatgctgaggcaggagaatcacttgaacccgggaggtggaggttgcagtaagccaagattgcgccactgcactccagcctgggtgacggagcaagactctgcctcaaaaataaaataaataaatttctgcgatgaatctaatcattagaaaaatgaattatttctttataatgtaaattccaatgtgtaggctatcatatgattatattttaccatctagtctgtacatctagcctgtgaaaaaaacacattgtacattgttcgcaagtattcgttcattctgttacgtccctaagaaaaagtttcgggcagcgaaacttgtattcctagtctcaatagaaatggaatgaaagaaatgtcatacgttttcttttctgagtgtgaagttggggaaaggatcaaatactaatgaatagcacttgttctagaatgcacatgtgtctttcatcgatgtgccaagattcagtcaaagggttccgtatgtgtgtgaaggagaaacatctgacacttaaactagaaacaatacaacattaaaaatacatttcctgtgaggctgagttgatttggagaaagagaagttttgatcttcaggaagaacataaatgtggctctagcatgtgtgtcaaatgagaaagcttttcgggaagagcttcataaactgtaaagtgacatgcatgtaaaggagaaaataaatattcctgcttatcggatggttgaacattagcaaatgaaatgaaaatagttgtttttgatttatatagattaaaatcaatatccaagttggatcatagactgaacagatatgcatacttacctgtctgtctcatgtgcaaaacagtagagtcataatgtgatctccacagtcacaaatttccctgcttttctcccactttccatttcagccaggtgccccacattaagccctaggcgtgtaggttgtggggattggttcctgactttagaggaactctttaatatttccacgtgctggaaataatacagtggggaaatagtgtatgaattttctgcattttgcttgcccgttatctgtggccctggctctttgtcatgtactttatcccttgtggcgagatttgctacttattactgcctgatctttccccctagtatttctgatatgcccatgctacattttttttttttttttgtaattagaaacagggtcttgctctgtcatctaggggctggagtgcaggggcacaatcctagctcactgcacctctaactcctgaggtcaaaggatcctcctgcctcagcctctggaatcactgggaggacaggcatcctccaccatgcctggtgagtatttttttgtttttttgcggagatggttcttgctctgttgcccaggctggttttgaactcctggcctcaagtaattctcccatctcagcctcctgagttgctgggattacaggcatggaaccaccatgtctatatttttcattctggtccttgatcttattcttgtgccatacctgacccatgtgtgttaaacttgtctactgttctgtctgtcaagttcttaccttgctcctgtctaactatccttacgattgtgtgcagtcaacctgttgacctccctacctggcagggaatcttcatacctgcctgtttgttcagacccacatagagaatttgggccctctgagacgcagacaatcattcacatttactttctcgtatttctgtatcttgagatcatgttggggacacatcgagtcagttttatatatgtctatttgttggaaaatatatatgtgcccattcagcaatttaatcagcaccaagatatgtctatttatgatatttagtgtggcttgtcacttaggatgtctagtgtaaaactacgtatcagaactccttatggattgatggtattgtctaagggtcagtattagaatacattagttcaagaaaaaccaaaggcaatgccattttaagtctttaaaaaatgttacatgcattgatccaatacatatttctagaatatcctctgcagtggaataatgacaatttctttcattgtactcgagtaatgaatcttcatattaaatattgatttatacaacatggacagtagtattcactgaggaaaattgggatttgctgttagctgactcttcagtcatggcataatttgcatctacaagctagtcttggtgatagggatacatgagtggaaatagcatctctgtctacctgccagttgtatgttctgaattgctttccccttatcgaagaactgcccagaattacgtagttcttatcaggaagctacatatgtgtctgcactgtacattcctttcttttctttctgtcttgttttgggggatagctcacacgtgttcatgtgcacacagacatataccatatggattttgtgccatgagaataattattaaagactctataatttggggaagaaattattttcttttccctcaccgacaatcctgcttatatttgtggtttgaattatagttacaacttgcagagtttatcctaagagagataaaatgagaaacaaatctgagggaaaaaaatggaagtggcaattcgaatctaaatgtagaagtaaatgggctagattattctgaagtaaaatagcagaaattctaaaatctaaagctatctagttgtatttaaaccatattatggtttagctcagttctgtcagaacatttgcagactaattttttctagagaaaaagcagttggcttcaaaatcaaaatgtactgattttcttggtttgtgaggctaattaagtttaactggtggaaaattaaaaatacaactaatgttgtgtgttttttcaatatttaggaactgcagagtccccaagataatattttagagaagtttttttttttttttttttttttttttcttgttttagactgagtttcactcttgtcaccccaggctggagtgcaatggtgcaatctcggctcactgcaacctctgcctcctgggttcaagcgattctcctcagcctcctgagaagctgggataacgggcgcccaccactacgccctgctaatttttgtattttagtagaggtgtgatttcactgtgttggccaggctggtctcgaactcctgacctcaaatgatccgcccgcctcagcctcccaaaatgctgggattggaggcatgagccaccgtgcccagcctagaagttctcatttgagacaactaagtcaaatatatcaatgaagtgctgaaatgtaatgtctgcatatgtagtttaaaaagtacaaagtatgtatgtttccttttgcagttcacaggcaataaagaatctttaatccattaatatttaaggaatattataaacctggttatttatatttggggaagaaaatggttaaaaatctcatggaattaattgtattttcaactaaatctttcatatattggtgacagcattgcttattctaatactgatggtgggagatctttttcaggcagcgttgtacacagtgactttgaagattgttaggtgccatcactatgcagctgttgtcactcagtgggaatgtggttgaagtcacattaggagacgtgatattgaacataggcttgaaatttatcatacaagataaggcgactaaatatttgccctggataaaataggttggtattggcaatgggaaaaagaaaaattaatctgacatacacacacacacacacattgcacacgcacactctctctccccagagacttgtcagatgctaaaatgactcttacaataaatctaaaagtcattgcttcagaaatgatgctactttatttgagtttgcttttccaaaagtgggtgaatttctgcctctacaatttcttccagagatgttttagcatacctcatcaaccacatacacataaacttctggttggatgtttaccacacatatacacacaaattaatgacaaatagagtaacctctatgagcctaacaagcctggctggcacatatcctgtgcatttaaactcatttttctttacctttccctctttctcacttctactgccccaagcaggaagggttgaccgcctccttttcaaacttcagatccagtcttcttactcctagaatcttctctgctcaacatgccatagtactcttacacttttctgaattcacagtggttattttgaaattaatctcacactgttttgtcatttcttctgtaataatttaggtttagtatagtcaagagtttgggttctgaagtcagatttttggcattaaattctggctccccctcatttctgatatttgaccaaattacttaatctgctaaccttcagctcctttgttggtgaaaagaagattgtggtgacagttacaccaactaaagcatgtgacatcctaagcgcagggctggaacattgtaaggaaaaaaaccgaacatcccaaattgcccgagactaaggatgttcctgaaaagcagaactttaagagctaaattagtaaaatcttgagctaacggggttgtaagcattttacttatattattaaacttttattgtgtgcagattcagtattcctggggaagtagagtcttatgttacctctttcccccactaactttcacaggggtatacacctgagtgcttaaatacttttatgtaggttgcattttcttataaagatgcaggttgcacaatatgaatatgcttaatgtcaaacaactgtacacttaacgattaaaaggatacatttatggtatgtatatttcaccaaaataaatagatttgcaatcttaaagtaataatggcgataattgttttatcactataagtagtatgtattactgtagtatggtcagcagtaagcaggatatagtatatactataaacaggatacattataggaatagaaataacatttagctaaaactagaaaattaaaacaaagataatatgagagtctagaagaggagaattgattattaggatcctagcattggcttgagagaggatttttgattttgcaaagatattttaggctgtacacttcctccttcctctcagctgatgaccgccaggtcctgctctgctccaccccaaggaaatggggtccgcttcccctcgcctcgtggcactggctttcccaggaatgttgcacgctaacctccaaattattctacaatgagctttctcttgacttggatttcttcctgcagtcccaggctgcttcccgaggcccaggttcaaacattcgcctccacagatattggaaacaaagcactgggggaaaagagggaattggggaaatagcatgtttaaaatagagccacatatacccctaaattcctgtcaaatgggggtgaatgaagcccgccagttcggtaggtccgcattgtggctgctcatttgaaaaaacaagacaccagccagacacagtggctcactcctgtaatcccagcattttgggaggccaaggtggatggatggcttgagcccaggagtttgagaccagtctgggaaacatggaaaaaccccatctctatgaaaaacacagaaaaatgagctgggtgtggtagcatgcacctgtagtcccagctacttgggaggctgtggtgggaggatcgcttgagcctgggagatggaggctgcggtgagctgagatggcatcactgcactccagcctgggtgacagagccagatcctgtgttaaaaaaaaaaaaaagaaaagaaagaaagaaaaataagacaccattatgcaatttcctttaccgccaccctagattctgatttattataattggtgtgggggacctgaacgtcatatgcagtcagggttgaaaacactgcaagtaactgattcttcctctgtcctcagtccttaatctcctgtccttcctttccagggtttgttgctcctgctgaaactgaagatttaacatataaaacagtaatgactgcttttatttttaaatgattcccaaagcttgagcttaattattttgtatcacgatgattaggcatgtctttaaaacttggtggttttaactcaattatagagcacttcatttttatattgaagtctgggtattcttagtttattatgcagtaagcctgtttcttcggcacttccctattcagagcttataattaagaatctgcaaactaaaatctagaggcaatctggcttgcttctgtatcctgcagggaaggaaaaggggtttctgtagtgctaagaatcctttcagattaaaaaatagcatcttgtttctagattgcatataaactttgtggacttaactcccacttatgtcttgtgatcagatgtgaataggacttgaggctttgacatgaaactctcagtgacacgtgtaaaagcaatttgagcagaaaggtccataccatggccgtgtgttataaccaagcagcacagccaccttgctcatggactagacaggagttttgttttttttttttttgagacagaattattttgctcttgtcacctaggctggagtgaaaaggcacgatctcagctcactgcaacctcctcttcacaggttcaaacaattctcctgcctcagcctcccaagtagctgggattacaggtacctgccaccaagcccagctaatttgtaattttagtagagttggggtttcaccatattggccaggctggtctcgaactcctgagctcaagcaatctgcctgcctcggcctcccaaagtgctgggattacaggcgtgagccaccatgcccggccaggactagacaggatttaactaggatctagttcattatttaatacttacttcaaaactagcagcatagtcctactttctcttttagcaattcctctctgattgtctaaataggggttctttgtcctaaaaagaaaaacaaaacctcattaagttatttgacatacattagctgataaaacagtagtcaagtgttagaaaatatgacaataattgcattgtgtcctagactctttattgggaaatttctgaatggtgattttctccctttttctggattttttcaaaaagtaagcccataggaaaaaacccaaattattttctcttttcacattacatctatagttaaagtaccatttttttctttttctttttctttctttcttttttttttttttctatttggaatttggccatcgactgtatctctatagtcattgaggggccttcaaaaccttcaccttttctttgatgacttgaaaccttaactgtggcttcactgcacaaataatttttttgctgccttcctgttcaatctctcagcctctgttgtattttgttctgtaaagtgggaatggtatctgttttagatagttgttgcagtaattaaatgatggcatacaaagcaccatgaacaccaaggacacttaatcatattctcttctttcacgcactctgcgtacatcccccccagtgaacttctttttgagtactcttcaacgtttcttgtgggtacatttcttcctttcatttactctaatctttgtgtatttacgtatatttcctcttttccagtttcagatttggtgagcctcttaacatgttcttagcatggtgcagtgctcacgcccataatcccagtgctttgggagtctgagacaagataattgcttgagactgggaatttgagactaggttgggcaatgtagcaagatcctgtctgtagggaaaaaaaaaaatcagctgggcatggtggcgtatgtccagctacttgggaggctgaggcaggaggatcgcttgagtccaggagtttgaggctgaagtgagctgtgatcacatcactactctacagcctgggtgacagagtgagaccccatctcaaaaaacacaaacaaacaaaaaaacaaaacttttcttcctcccttttcatcttctcttttatgatcttcacatgtattcacttctttatcttggttttatctctttccattttaataataaccattaagcagaaaatagcctatctgtggaagtactttattgtacagtagaagagacattttgatgttataaatgttgtagaatattccatatagagcctgaaatgcttagagctttagacagcttctagatctttggtcaataaatcttaccaatgtgaagtgaaagttgagtcacacttctgtgtattttcattgacttagtataactaaaactattatttgtggctttaatcttgttgacataaaacaacctgtcaaactcaaactctttggttagaaaagccattgtcccccatttgtagcaatgctaatggtatctgatgactagtttaataaacagggcactatgcttttactctttgattgaaaagcccttgtttgttgccaaatgaacctgacatcttactttttaaaaatcctttgattccacatgttcatggaagaaatctcatacatggaatagctatctttcaaccaaattctcagtgaaccaaatgtgaagccattgctttagatttccttttgcttgttttatttacctaagtttccaaaaaaggcattcctgtagcataacaatagaaaagcagtgtttatgcctcttcttaaattgctgtttgcttttactaagttgatttctttaggctttcaattatgtttgtctttgtttttttgtttgtttgttttgtttttttttttttgagacagagtttcactctgtcgcccaggctggagtgcagtggcatgatctcggttcattgcaacctcctcctcctgggttcaagtgattctcctacctcagcctcccgagtagctgggattacaggcacacaccccacgcccagctaattttttgtatttttagtagagatggtttcaccatgttggctaggctggtcttgaactcctgacctccagtgatctgcccacctcagcctaccaaagtgctgggattacaggtgtgacccatcagttattttttttataacccctataggagttccctaaaaactcttttattgtaccaagtataaggtagataactaggttttataatcccaaagaaactttttaataactaattcagccagatggcaaatgagaataatcaataaaggcatgaagataaactgcaagggctagatagatggcttatgtttattccaaagtttctcattctaaactcccttccctgctgtctgcaacatatacacatttagaactaatacattactttcttttcttgctatatttaacagtagcacaggttccctttcaaagtcagatataagtaaggagtaggcataaatataacttgtatgtgtgtgtgtgtatatatatatatatacacacacatatatatatacacatatacacacacatatatatatacatatatctatacatatatatatgtgtgtgtgtatgtgtatgtatatatatatataaaatttgagataagattgctctctgtcacccaggctggagtgtagtggtgagatcacatggcagccttgacctcccagatacaagcaatcctcccacctcagccttccaagtaggtgggatcacaggcatgcaccaccacacacagctatttgttttattttatttttagtagagacagagtctgctatgttgctcaggctggtctcaaaacttctgggctcaagcagtcctcctgctttggacttccaaagtgctgggattacaggcatgagccaccatacccagcatacttattttttgaaagccaaaatgagaaaacattgttaagcaacattcttgaattgtcagcacttaacaggcactaagctgggactgtgatgtataaactaggtgaacctaaatgtattacagagtgtgagatagcctattttcccaaatttttcaatgtccattcctgaaagtttttcttaaacatttaaagatggctgtgcttacctctacacattaaaacttaaagttcacagttaaatggtgtaacaatgaattagaatttaatttttataaatttacagagatgtttatatttaatctttcaaactttacaaatagattcaagtagtaattaatgaagccatgagttgtttaaatggttaaaaaccagtgcaagactaacagtctggagtatgcaggctgaatcatttaattggaaataccgtgagtagccagtgccattttgttaattgggtaaaaggccaggtgcccaagaccctcggtgctccaggagagcaattgtttttgtcaccccttttcttcctggcatgccttgaacatagtggacagtaataattattgttaccatttgtgaaggcttactatgtgccaggaaatgcagtatgctctgtgcacgcattaactgataaatatttgctgagagcagagacagtgaatgaatcaatggacaaggcttccagagtctaatatagaaaagcctccctactcagctaattaagtgggcctggagatctatgggaatttcattcttttttcttcgtgagtggattttgacaatatctttaacatctgttgatatcaaatatttaaattttgttgataatgttaaaaagtgttcttttctgaagtatttgatatttaatgatgttttaatgactttgcaatatactataattcaagtggagatcttggcagtttctctttggtcccctatctggacattaagcataatttgtaataactttataagataaattcactcaagaactatttaaaaaatcccctttcaatctaatataattatcatctggagaacatattaaatgatttgtaattttctgatgattaaacttctttaaagtattgatgttctcacttattagagtgaattttctacttataaaatattaattattcataacactcagaattaaatcttatttcttttattataaaaactgttctgaataaatcaacccattataattactttatatactcaacctgattaaacaaaaatggcaaactattatatattttatagcacatatgactataagttttactaatgtagcacataaatttttcaaaagacaatgaagggcacgctacgaaaataccctcatttatagctcatgtttctggtcacagataacttaaacacattcacagagaaacacacaagcatatgtctgctgattctgtggggttttaaaatctagcttctgtgttggcttctctagaattccgagttcttcaaaacaggaactatgccttttgaatgtcataattagtggtttggagagcacatactaaatgaatactattttgatacttttttaatatagaagaataatgtttatgaaattctttaaggatttggtttctcaggcttttgtaacgtatttagctgacttatttagtcttgataagtcagctgaatatcactccttcataaaacaaagacttcatatattctaagtaaatgtttctttaaagggtatggactttttgttaactaccgaacaaacgtgttgctaaacatacgttatgtttgccgtctttgtaaaagtaacattcagctgtatgtcttgaaatattgacagtatctgttatatgagaaataccctgtgaaaacacttatactctatcattaaattcctttaaaattcttatttttcttttggaaaatgccaaaaaggatcacatggtcgaataaaaacatgatttcattaagggagtatgaaaaatttttgtttatgtttttaactgagcatctgcaatagagccacaagaatatttaaagcatatttaactgcatgctaagctgagtttctttatgtgtccctaattactaagatttctactaatctagagatcacttataacactgcaacttaaatttcacaacactgaaaaggcattttgtttcagaagcttctagcagagcataacatcactctgagggtttgggatgggtatttcgaggctaactttaaggaatctttgtgtgtgtgtatgtttaacatgcagcacctgttcttcccggagcctatcagcaaagccattcccaaggctatggctacatgcaccagaccagtgtgtcatccatgagatcaatgcagcattcaccaaatctagtaagtgtccatttgatacgttcctccttagctggtcttcccatttcccctcaagcatgtaaatacatgtggaatagagttgaattgaatattgggtattttcatttaaagataaatgatgatgtgttgccatttatacaactcttttgaaggaagcaaaaaacttacagaggtaaactgttgagaaaggaaggcattaataagcattacataaaacaataaaacatacaaagaatctaccagtacagtatcctaattgttacttcatgattggtactagccgattatgctctttactcatgccttaggagcatggatatttgatggttgtatttacaagttcatcttaatcaaaatgaacacaaaagcctaaattatgtggccaaaatatatcttcaaatcccccattggaaatcttgaagaactggttcatatattcagtgtaaaacttggaagaagtgttcaacatttgctagttatacttggcttctcatgcagaaatttcttctacaagccctcaacatagtctcttggtctttgcctcaacacctagaaaactcttctacactgtccggtaacttgaattgctctaaaattctttgggtcccagccatgtcctcagtctgtgaatgtacttgattttgagattgtctgatgttaatgttagctaaatgcttagccttaaacaaaaacaaatataggaaaactcattataatcataatataataagtacaattgagtatgtatcttaacattcaggacacttatatgctaaatttctctcatagtgatacagaaacctatatagtgagtatgttatgagttttttctttcatttgttttacatagttttaagaggaaatgaacatttttagcatcaacttaagaaaagtacattgccaggagagatttgaacttctctgacatatgacgagttttgttctctgaagaatatgaaatcacatattatctaaggtttctggggttatctgaagttggggggaacttggctttattatttcaaagcctactttttgatgggctacctgtcgtatttagtgacttttctatccctgttccaaaaatattaagctatttgctagactagtaaacttgagatcagcacaatgagatgctaggtttacagatttccagagatacatgtgtttgaaaacattcctaatagttactttatgtgtgggtcggtgtgttgtgattggaatttgtggctgtagctatttcggcattcatcgtataatcccttcttcctttctcagaggacctaccgagccatgtacgattacagtgcccaggatgaagacgaggtctcctttagagacggcgactacatcgtcaacgtgcagcctattgacgatggctggatgtacggcacagtgcagagaacagggagaacaggaatgctcccagcgaattacattgagtttgttaattaattatttctccctgccctttgagctttattctaatgtatcccaaacctaatctttttaaaagatagaagatacttttaagacaacttggccattattttacaatgatgtatccttcctttgacaattagacacacaggtaccaggaagaaggaatgacctctgggctgaaaacagcagcattttcagtaattcctacaaacaaaaatctttgtgtctggacacctggtgctgctaattgtgttcatggtttcctttgattggctattgaacccttctgggaaatgtatttttgtagactttaatagagaagttgattgtcccttaaatgtagtgtgtgtttgaaacttcttagctgtcactttggaatcaccccaagccaattctcttaactctgtaatgcagccaataatttcaaacccgttttgcttttgagtcatgaggcaatttccaatattagtgaaaattgcccaatataataagtgtaaacagtggcagaaggacagtctggttaaaattatattgactggtggccttagggatctagaaacttctactaaacagagaaatttccttgttccctaggctgactggtatctatttatttctcatttgtaccaaggcatctcctactctccatttatattctatggacccaagtctatgctcagttccacagaatgtcaggaccaaataacttcacagctactctgcaaagggcaaattataatgtcattgatataatttccctagtagcatttaccctgttgcatgtcatgtagattcaagcttctgtaacataggcagctgcactgcgcgttcctattattgaagcaaaaagggtgactgatacctaaaagccctttcttcctctagtcgccagctcatcagaaaaacatactttgaaaagatgcttgagattttcctgctgcatcgcactctagttttgaaggatttacatcttaggaaataacatgtatactctagtaaataagcgatttaggtgttccattgaacagctttgattaacttaatgccaccattgatttcaaagtgaagaaaatgtaacagaagccagtgaagcaatggaagctggagtgtgactggaaaaatactcagcaaacaaagttaccaattccatacagagatgatctggtatcttcttttggaaaatggtattcaaattctggaatggaaatctagccaccaaaacgggttaatcaaaagacgtccttttccatttttttttgcttttattttctaaatcatttttaagggaatgaaacaggaatgtcatcagagattttttagtacaggcccaagagcctgttctctaagaaagaaattgttgccatgttttgattttcgaataagtgactttgcaggctttatgctagcccttgctggtgggtcttgaaatttcatccagagtctgcagtccaggtcaccaagccagcggcacccgtcggcaaccctgtgtttttctgattgtgccgtttactgtgacctgcaacggggtggcattcacttagggtctgacttcacagctatgacaaaaccgaaaaagcaaaactgcaaaaaagtactaagatgtacgggtcttggggatatctgccttatatgttatattcaaggaaattaacaaaacatcctgtaaaacatcgtttaaggaaacgtttactagtccaaaggccaaagctaatttatttccactttagaaaagttagcacatgcttttgaaaatctgtgatttcattttattaggctaaaagggtaaataggctttattacactgaagctgcatctatatgtcactgacataaagttgaaaaaataaatgcaggcaaataactagagacttcttttaagggggtttggctggttttctctcactgaaatggccagtcgtgattaaagtgataaaaccccatatctgttttggtatattgtacacaaacctacaaaaataaactgaacttgcaatatttttgcaaaaaaatctgtcgttaaaactgaggataaaatacctgctcaattttattttactaagtatatatttacatttcacccaggcaggccattttcttttgtgattataagaaagagtagttgttgattaaattttcagactaaatataggacaggtacaattttggataaatagcacatttataagaaccgcaatgaaaactgacttgaaataatgcttgtaatcaggaaagtaatttcatccaccgatttcaaaaccagattcactgagcataaaagtcaatacatatttgaggaataagtctcctaaaattttaagcttcacgtaataatgtttgcatagcaaaatatttctgcttcaagcctttaggaattaagatctgatcagaatttaactaaagggtagttgttttacaatgaagactaaaactgaacaagatgttgcatgctcttgaggccataatttggtagtgttggcagttgttaataaagcttgtcaggatgttaagcatctcaggagaaatattggaaaattatatgtataaaaccaaagtgctatttttaaaagcatcatttaaaaaaaaatgacatgcctgaacaacttttccactttccacgtgcttccctcccacctttggtttggcaacaggtatctcgtgcatgaagctgacagctaaagaagattttaaaaattgagttaaagatgactgtgtaaatgtccaagcacagagagcatgcacctgactttctaaagtttgatgtgttctcaagcctgacagaagcacaaggaacagtttgatacacttttaaaaggttctgaaaacaaagctgtatagggatcctctctctcttgagcaaagtatagcaacagaatatattgcttttgttgtaagcttttgtagtacatgtttttactaataattcttgttctctagaaagctttctatttctaacctatggcaaaatgaatccttcatgtcttcttgttattgtttacacacttgcagtgtagcccagtttgaaatatttatttggttatcaactgcccatggaggaggctcttgatgatcccaggtctcctcgacctccatacaccacacaggcatttgtaagcacagtttccacaagcaccttgtaggaatatggataagattagaccagcccctctctgtccactgggtttatttcttgaagaagatgcagatctggtttttccaatgtgccacagtctttccttatcctctccatgctgagcttgacaacactctgggaatgaggaacaagactttttctaaaaagatagtggaagttcaagggatgtacctcgttttcaggttcatccatctccagtggaatgttttcaataaaagatgaagaaaatgtgtgtgatctttaataacacatccctatagaaagtggataaaagatataccaaaactgtaatacagatatatacaaatataggtgcctttttgattactcttgtttgtctagtatgctcttggaaagaaaaccaagcaagcaagttgctgcctattctatagtaatattttattacacatgattgatatttttgtggtagggaagtgggatgctcctcagatattaaaggtgttagctgattgtattttatctctaaagatttagaactttagaaaatgccgacttcttccatctatttctgaaaggttctttgtggatttatatagagttgagctatataaacattaactttagatttgggatttaaaatgcctattgtaagatagaataattgtgaggctggattcactacacaagatgaacttcacttcataaattaattataccttagcgatttgcttctgataatctaaaagtggctagattgtggttgttttggttaaggtgatatggaggtgggagagcttttagttaagtaagaagctatgtaaactgacaaggatgctaaaataaaagtctctgaagtattccatgccttttggaccctttcctcgcaactaactgtcaactgttgatcaaaaaagtcaaggcattgtatgttgcttctgtggttattattctgtgatgcttagactacttgaacccataaacttggaagaatctttgagcaaattttctcagttgtctgtatgacttcagtatattcctgggaatgccataggattttttgtgcttgatacatggtatccagtttgcatagtatcacttctttgtaatccagttgctgttaagaatgatgtactttaaaggaaaagagaaaactgcatcacagtcccattctccagtgtccatgcaatgaattgctgagcatttaggaagcagcaccaagtctattacaggcatggtgtgaaacttgatgtttgacctgtgatcaaaattgaaccattgtacagtttggcttctgtttgcttcaaaatatgtagaattgtggttgatgattaatttgcgagactaactttgagagtgtaacagttttgaagaaaacattgaatgttttgcaaatgaaggggcttcacggaatgttacaatgttactaatataatttggcttttgttatgcaaattgttaacaccagctattaaaatatattttagtagaaatgctttaattcatatttttttcctctacactgtgaatctttaagccttggtggactagagcaacatcgtgctgcccaaaggactaacctatgcaaactagttcacattttagtggatgtcgcagttaatgtgtaataagacattatttcccctgcataatgtacaacagcattgaaatgacacattaagcctagcatcacattgtatagtacagtcactcacaaacccttcaaggctaccctaatcattaacattaatatttgtttaaaagcaaatcaccgatttatctattgaaactacttaaatgacggcaaaccaggaatgacagatggctgtgtcagcaatggctttaatgtgttccctgcaagtggtctcctatgatagaactgcgttctcaaatgcactctcttcagggtcttaatattctgtgttttctctctgtatttgtaaaacattataacacattaatttcctatctctacacatttggtttgcttaaataaatgcaggatataaaaaaaatggttcacttcttggctctcaccgtggtttcttggagcatgggttgttagatgcaagcaatgcaccctaataataccccgggtctgagatttaacatgacaactcacatcaaatcgcatcagaggtgtgtgctgccttcagtgcatttacattggtgaatcagtcaagatattttcctcccccaaataaacttagttgtaagtgataacaatattatgcttctccaagctcagtatctttctgattttatatcaaagtaccgcaacaatgcatcattgtagttaatttatttcaagaataaattcctcatatgtcctcaatagtacaattctaattttcttctattcataagatgaaagaaatggtttggagcatagaatagaaagtgcacaaattgagtacataaaatgggaagcaactgatttctcagctaagaaaggctcatttatcacagaacacaattgcttttctccccccactacgcttcccataattgaaaaagtgagtccctatttttcacactcatataaatctatgcgatttggatgctagtcttattgtattattttgtaaaactttctctttggctcataatccttcctaattgtaaattgataaactttgcggatgacatctgctcgtagaataaacacttcttccaaa

SEQ ID NO: 558 - DNA, 95176 bp, Homo sapiens
acagtatctcaagtcatgctgtatccagatttgcttttacattttcttgcctgagtctgaggtgaacagtgaacatatttacatttgatttaacagtgaaccttaattctttctggcttcacagtgaaacaagtttatgcaatcgatcaaatattttcatccctgaggttaacaattaccatcaaaatgttttgtggagactatgtgagtataatgcttatttctgtaaagcttttcactcttttgaaacttgatttataaaatttcatttgtgttttttgacgtttttaacagaaaatgttgttctaatttgtttttattcttactactttcttactattttatgcccattttttgaaagaaacatttatagaatatttaaattttatttctgggattattaaacattactatgataacaagatttttttaatgcaattatttgctatgcttctgaagcaaataaagaaaactgaagattaaagatttggatttgagcatacctaagaatccatttaattagtgggtcttcaatataactattaaacagagttaatattatgaaatcttaaatccatgctaattttgaaacaacgtattatcccacagaggcaagttactttcatatgtaatttgattcagaattctaactgaagttatcataagattttttatctcgatatttacttctatctataaaaaattaaaataattttgactattaattttattttaaatccatgctttctgtaaaagatagcttatttttgaataattttctgttgaatagaagcaatgtataacaagatttagtcttttttttggccttgtctgaatcattttagtccaactgctctaatagtcattcactttttaaaaagccaacatgaacattaagttgtctgaatatgctttatatgaaaaggtctccatttcacatggtcttgaaaattatatacaaatgtgaatttatgccttgtggtcttagaaattatatacaagtatatgtgtgttaatgatgattctttacaaatctatactataaaaaaactttcaggagactgaggcaagagaatggcgtgaacccgggaggcggagcttgcagtgagccgagatcgcgccactgcactccagcctgggcgacagagcgagactccatctcaaaaaacaaaaaacaactttctgggaacttttatgcaaaaaaattataacataattattttgttaaactttggcacacaaaacattgtttactcatacaaagtaatcaatgcaggaaaattttacttatatattgtgtttcttaagataaatactgaattaggacttaaaaggcagctattttccatcactgttagtttaacaatcttaatttcatcttaagatttcaagatctcattttgcagttgaaagttaccattattgttttattaattgtaaggtggttatatttcactacagagaaaaaaaggtatcaagtaattaggccagcatggtaaatgattaaatttgcaaatgcctattgttttctctctctgttcatttgagtatagttatttgggagtaattactattatattctatgcattgtgtggtctaatgttactatttatatgcccatttttcaaaagaaacatattttatagaatatttaaattatatttctgggattattaaacattaccaggctaacaagattttttttaaatgcaattatttgctatgcttctgaagcaaataaagaaaactgaagattaaagatttggatttgagcatacctaagaatccattttaagtacttttgattagctattttagagatgaatgttatgttttatgtataatctcagcaagcctggatggtaaaatggttttacataatcaatatcagtatagtttaaagtaattttctatcttaaggtatatgaccccagtggtcagaatttagtgctaaaaaggccaatatttgaggccaagcttatctctttaatcggatgttctcaagcaagagactggctcttctgttgacaagtaatttcttattttataatgtgggtagtaattgactgagttgtttgttaaagatatgtccctagatcctccttatttagcagtcctgatgcagtatatataacatctgaacttatacacttgatataaaagggttaccatttttgagaaccacagagataggtagttcattactctcaaagtatagaaaatttaaatatacttcaagcaagagacaagaatcatggaaaaatggttacatttctgtaggagataaacatacataatatgttaaaattattttctatatttctggagttaggcgggccccagtgattaaggtagtttaagtgtgcttgttacattaagaaggaaatttatctttggtgcactagtgtattttacttatgtgcttgactgtaagaccatctttcaaaagcaaggtttaattaagagattattgcaagcctgagttttgatatattagtcagatataaatcacatcataggaagatattattataatattataatagctctcttagaatggaggaaattttactatacagtgtacttgcccaagtcaggatctaaacccaggtatctctacatccctagagctcaaattctttttattaatatataatgtctctttagaatacacctgcctctttagaatacaattttcttgtaaaaattgttcgctgattttgtcctgttttgtcatcagctgatcccccttgttcatacagtagcatcttatttactatagattcatttcttagatgatacccttccttttgacctctaataggattagagttaactttaatcctattcccttttctacccttttgacaccttttcctacttctataatatttattgactgacagaaaatgttaatcatagcagtatgaaaagtaggatacatgttgatatcatatttcttacctaaaatagcattatgtattatacaaacatatagaaattattataataatttactgtctatatacatcatccataccttgtttaatttaatcttcacagcaaattgtcctataagaataccatttaacatgcaaaggtttgaagttcttttggaggtactagatattctacccaaatgttttatacatattatttttgtgtttgcaaacttctaggacagtattatcatcccctttttccagatgaaaatactaaggttcagaaaaattaaatacttttcccaggagttaaaagccagtaggtgacagatacagaggattctgtgtaactccaaaatcatttctaccacactgagagaaaaaaatgcctaggtatgattattttttgtgaccccaattaaatgagaaaaacttagcagcggtatctttacaaagatgctttgactcatgagtttgcctcagaatagctcaagagcacgaaagtcaggcaacagcatgttaggcagtgtctactatgggcaatgagacatacagcattttagcctaactagaataaaaataaatgcattggtttttagcagtggattacatgtagtgaaggaaaagcactccataaatcagaaatgaattcagggcatattacctaggagtgattgcagactgacaagacatctcatgggaggagaggctgttgataaggcaagattattttcaagactgtcttttcctatagaaagtaattcccaggacaaaaacttccatccaagaaatctgactttgattgtttatctgcagtatgacttactgagcaaatattattaaaaggttattcatacttcagattgcttttcactatcacaagactacattgtctgaactttacacactttgattcaacaaaagttttgaatcatgctgttatggcttcaacttttactgaaacttctgtagaactaataagagttggattggaaaaattaaatttaactttttccttgaactggcatgcatgcttgttgtaaatttttaaaaatataccattataacaaccatagattggttttaatctaggggctgggcaaacatcactgtagcgtagtggctaaagatacacttaaatctagcctttctgcataggatccatgtgactgagcactacttgctgaatctttctgcacctcaattttttttaacctgttaagtgtgataacagcacctatcttataagggtctcttgagaattgtttggcatataaagcaccaagaagagtatctggagcatagaagcatcccaaaaagatgagctattattcacagtaccagtgccaaagcttgaatccgactctgtctaattcaaaagccctggccttcagctgcccaatgcactgcttctagaggggaggttaagtttgtatccattactaatacaaatgcatatatatatatatatatgtatgtatatgtatatacaatacatacataagcatatatgtatgtgtatatatacaacagtcccaaattttataaagaaatttgagaaacaacaaaagtttcacaaggggaaatatattttctgttgtacttagcataatgtttatttataagtagattgtatcatgcaaaaaaatttcataaacccacttacttcaatttctggtaacttctcttctttattatggtaaaactcctcaaacttgtattacacccattatatacatttcttctccttcaattctctccgtatccattcattaggtttctttctcaaatgccctgcctgaactgctcttattaaagtaaacaatgaccttcatatggttaaatcccatgcctaattctctcctctcatcttgctagacatatgggtgttattagacacaatcgcctttgccagaagtattccagggccaaattcttgaaactcttctccttcctccttatagcctctcctttggtcataagatccaacataatggttttaattacattctatatacagactcttttctgaatttatgtctcaacccagaacctatgcatgaaccccagattcctgtaaccaagtgtctactcattgagtagaaactcatcctcttattagtacagaaaaaggaaagttaaaaaaaaattaagccttgctattatccttggctcaggttctctcataccttacattatcattgcctgccaacttctgcagtggcttcctacctggtgtccctggtcccacctccaggtactggtcagagagtaataaatatcattgtcataaaccctgacctcttgaaacatgtatttcattgacatataagattcatactcactctgcaattacacaaagtaatggaataggaggtaaaagtcagcaaagaggatattttgagaaagccatcttggtttgaaagttcttaatttataatagctagaaaaataagaagacttcaatttgtagaatcacttgcatttttccaagtgagaagttagaacacctctctagatatgttggtttctcttgaatggactagtttttgagattattataaaattatctgttattttgacattatgcttataccattaacattaatacagtgtgcccatttaaataagtattactttaaatctaaggcactcttgaaatttaaaaaaaaaaaagatgtttaactatatgttcttttttttatttttcctaattaatcaacttatttaacaaacagtaaaggaagaaagtcattagattatcacaaatggcaagcactaagaacgtacttctttccttaacccttaaggtgaagtcttcagaaattatgtttaagcaatatgaatcatagttagtttaatgagtcatttattcctgcaattaggtggagaggaaaagcagaaagaaaggagtcatttaaaggtcattatttaccaacttttcatttttcagtatagcctcacacacacccacatccgacccttatctaccttagagttcttctatcagtagaaattatttgtaatcagaagtagctcagcctgattcatcaaaaaggaagggattgcaataatttttaaaaggagatttcagagtttatgctgtcaatctcccagcatcagcttcttctaaatagtctccagctatttgtaatactttactcatagcttttggacatgcatttgttatcaaaggcagagtaaaacttgcttcctggggcctatttttccttgccagcatcacagtcttacaccacacagttatgaatatattcttcctcagttatacttttatttatgtcctctagacattctgggtaattatgctggaaggaaccagaaaaaaaaaaagactattacaagtatcatgtacaaaacataaaagtaaatccacacaagataatgtgttttatataccctgttatagatacagtgggaatcaacttcactcacagcaactttggattggcttttcatctttatttggtggcaatttgtaataataaagcaacagaatgtcttcatgtattttatcattctatctcttaattgaaacatttctgctattttatttttaaataagccagaatggaaggcattgtagtaatactttttcagttatgtaaaaagaaagcactttaaccacagcagatatagcattcttagtactgtgaattagtaatcgttttaaaatatgtaaatcatattgtattttattggtgggttattcttttgttgttgcccttagtacagtagtaaacttcttgaattattgttcaaccctttggagatattgaataaatgtacatattcttctaggcattcatttagttgccagtctgaaaatattgtttgaaaaggtaagtaagaaaacggtcaaagatgccgaaagagagaggcgtcagtacctggggacacatgcaccttctgtgtacctttcctcacctgtgggctgactgctgtgtgtttaatcaagagggcaactcacatatagaaaagtaaatattcacagtgaatacagtagtcccttcacagtagaaaagggttagattcatgaaccctcagtgaaaggtaattaattagtggttttgaaataagactttttcatgtaacaatggttacaactgaacctaatacaacttaacgaccagaagaaactcttcgagatctcactcccttctggttcttattttgtttcattctagatattgtgaatactagaatgactgtgggcggctatgcttggttttccttcaagatattcaatgacttctaatttcatgacttagtggacttggtcttttttttaaatatatgatccatatgtctctgagtgctacagagacagaaatggtttttataaaatgttattttagtcatttggcagagggaaatcagtatcaaataatacctcctctcagaatcactgggttacatataaactgtctgccaacaataacagagaaacaagtgagttagtccctttcaaatattaggcttctttctctctcctacaacatgcaagagttcagctttataatctaggttcatttcctttttgttctttctcaatgctttttgcatattgagaaagttttcaaacaaaaattcatgtaatctagaatcagttgtagaaatttttaagataggtgcactaaactcagaaaactagtcaaatggtgtattgtaattaaaggcatcagattaacttttcttacatttagtcatgtttttaatctagattttttaagtctgatttagagagacatgtagacaggttgaattttcaaaaatacttagctttattggcaatgtagcttattcttctctcatctgattttgatttacaagaacattctttccttagagtgggatataaaacagattcatcatgaaattgtacttccctgtaaggctttctgtcacctcactatgacaatgtgtgaggcaggacatttccatatggttaagatgattgtcacccatctttctattcacaaactttttccctccttaagcctctcatacaggttccttcatctttagctctaagttctctgcttctctctcttgtatggggtgctcttcaaagtgaagacaaaaacaactgggatctgtttcctgctacaactcattattattctcatgtttgaacctctatcttaattcgcagttgtaattcttgtgaaattattttgtcaaactatacggtttgaagctaaattcaaaccaatgtggcaatttctgatttaaaagtttgccatatttagttttatgagactagatatgcacctaaaaatactatgtttaaactttttgttttgggaacatttcagatttacaagaaaaagttgtcaaaataattcataatttgaattacccttcccccagctttccctaatgtttacattttatataaccatattgaaattatcaaaacaggatattaaaataagcacagtgcaactaactaaaccacagatattgtttagattataccagtatttctgctaatcctttggtttcctgcttgatatggtttggatctgtgtccccaccaaatctcatgtagaactgtaattcccggtattgaaggtggggcctggtgggaggtgattggatagtgggggctgtttctcatgaatggtttagtactattcccttggtgctgttctcatgagagtgagttcttgcaagatctggttgcttaaaagtgtgtagcacctcccacttggctctctcattttccttcactggctgtatgatgtgctggctgcccctttgccctcctccatgattgtaagtttcctgaggcctcccaagaagctgagcccatgccaggatcatgcttcctgttcctgtggaactgtgggtcaattagacctcttttctttataaattacccagcctcagatatttctttatagcaatgtgagaatgaactaatacactgctcccaggagctagtggccattgggaacacttttaagcttaatcttacttttgacatttctttcttttctcttttctttgtgttttttttgggggggaaggggacggggggaagcttttccttacttacagctacaagatgcattaatctaatcttgtattttttcttattccagccctagaattaaccacttctccaaaacgccctgattccttccattgaagaccgatatttaaaaccaagatctggatactagttatactcattgctactggggtatcactgtttatatgccctcttaagagtacagagcaaaaaatatgtgtgtatactaacccatttatctgcacacatctatatttacttttgtacatgtgtatgcatatatgtttgcatgtatgcatgtctccatctaccttcctacttatcgatttctctgtctctatccatacatctatctaccatctatcttcatactaatacctccaatctaatcaacaacaccgttctaaccttcaccattatttgttacttctttctcagacagtgaaaactaagactatcaatatctgaaacctgtttgcttatttgtttaaccctaccatacatgtagtttaaaacttgctaagccattactctgtgagaaacaactttaccaagaggagtacattgtttggattatttttatttttagctttacagttcagtcaaaacactattttctaaagttacttagggcacatcccctctctccactgagcttattgtggttatgagatttatttgttatataaatagataaatttgctacaaactgcattttctgttgggttttccatacatctttgttgattttgttaaacttacatttaacaaaatgtgctttttgtggtatacaattttatgatttaagtcatgtatccaatgccacatttccttatagaagacttccattatccaaaaattccaccacactgcctgcctgtagtcagctaccgaccccaaactccaaactctggcaaatattgcactgtttgctgctgctatagtttcaccttctccagaatgtcatgggaacagagtcataaactattgaaccttttggacatggcttcctccgcttagtagaaacatttaaccctaattcatattgtattaatcattagttctgccattttattgctgagtcactgtctcttgtatggatgtaccacaatttgtttatctgttcacagtttgaatggataaactgtgaatggatgaactgtgggttgtttcaggatttagtgattataaataaagctgctctaaacatatcaagttaaagtttttgagtgcagttatgtttccatttcttttgcgtaaacacttagaagcaagattgctaggtcatatggtaacagtacgtttagctttagaaaaaactggcaaactgttttcccaaagtgactatacaattttgcattctcaccagcaatatattacagtagaatatcattgtagttttactttgaatttctttatgggtaatgatattgatcatatcttcatgtgctcatttactataccgtcattgtgaatgtgtttgtttaaaatacttccctatttttatatcattttctttgtttatttatattgtcctatacatattctggattaaacgttttatgaaaatgtaacttacacacctttcctttctttctgtggattgtcttttcagtcctttaacagtgcttttcaccaagcaaaagttttcagttttgacaaagtctaatttattttttcattatggatcatatttttgttgtcatttctaaaaattctttcacttacccaagtcatgtagattttttcttatatttttcttctagaagttttatagacttacatttctattaaggtctatgacaaattttgaatcaatttttgtataaggcatgaagtataggtcaagcttatttttttatatgaatctccaatttttatagtaccatttcttgggaaaactgttttttctctatcaaattgttttcactactttgtcaaaagttacttgtctgcatttatgtgagtctagattctttattctgtccaatcgagctatacttcaatattgttacctaatagcagagtttcattagtactacgacttaataataataattcttaaaatcagttagcattactcctacaattttggagtttcttttcaaaattgtttcagctattctaggtattctgcatttccacaaatatttttgaataaaattgtcaacatcgacacaaaattctgccaggatttcgactgggattttgttgaaaatgtaggccaatttaaggagacttggcatcttaacaatattaagttttctagccatgaaaatggtacatatctttatttatttatctttttaaataactgtcagaagtattctgtttcttctattccaatatgtataatgcttatttcttttaattttcttattgcattgcctaagatttttcggtatggtattgaagtaatggaaaataacattcttgctttcttcctagtctagagcagactggggcgctggaaagggaggtgaagcattcaatatttcacctttaattttagatgtagggtttttgtagatgtcttttaccaaattaatgaagttgctttgtcttttaaatttgcttagtttttaacatgaatagatgctatacttgtcaagtgttttttctgcatcatgttttgatggccatataagttttatttcttaaattgttaataaggtgaattaaacagattgatttttgaatgttgtgccagtcctgcattattgggataaacacaactaagttgtactacatcctcctttttatatattagtacattgaattttcttgtattatgttgggcatatttgcatttatgttcataagggttactatcctacaattttcttttcttgtaatgttgatttggttttggtattagtataatctagattcataaaatgagtcagaaagtgttctcttctattttctagaaaaaaatttggtagaattgatattatttcttccttaaatggttggcagaaatatccagtaaaaccatgtaagctggagattttcttgctgaaaggtttctaaatacaaattcaattttctcaatagatatgaggcaatttaagttaactgcttttcttgaatgagtttgggtaattttagtctgtcaagaaatttaaattgaatatatatgggcattgaatcattcatagcattccttttggtaggaatgttgtcatctatttttatgtttatagtttgtatcttagtttttctttgtaaattggctacagttctatcaatttcattgttgtccaaataataactttacttcattttatttatttttctctttttaattttattgattttactcttgtctttattacctcctacctcctgcttgcattgcatgtaaatttctattatttctctaatttcttgtggtgaaaacttaaattttatttcgttctaatatatttatatttaatgttataaatttacctttaggcactgaaacatatgagtattaaaagtggcagacttgtgtgataaatgtagatgagtgaatttgtttcttctcttgttttgatcagcaaaggtccatgtggtcttgaaagcttttgggatctgtagatttgggcacttttttttttaacttttattttgagttcaggagtacatgtgcaggtttgttatacaggtaaactcgtgtcatgggagttcattgtacagattactttgtgactcaggtattaagcctattacccctgagttatttttcctgactctctccattctcccacccacctccctccagtatgccccagtttctgttgttcccttctatatgtccatgtgttctcattatttagctcccacttataaatgagaacatgtgatatttgtttttctcttcctgtggtagtttgctaagcataatggcctccagctccatccatgtttctgcaaagcacacaatttcattcttctttatggctgtgtagtattccatgttgtatatgtgccacattttctttatccagtctaccattgataagcatttagattgattccatgtctttgctattgtgaatagtgctatagtgaacataaacatgcatttgtctttatggtaaaatggtttatattcctttgggtatatacccagtagtgagattgctgggtcaaataatagttctgttttcagctccttcaggaatcaccacattgttttccacaatggttgaactaatttacactcccaccaacagtatataagcattcctttttctctataagctcaacagcatttgttattttttgactttttattaacagccattctgattggtgtgagatgatatcttattgtggttttcatttgcatttgtctaataatcagtgataagctttttttcatatgcttcttagccacatatatgtcttctttttaaaagtatctgttcatgtcctttgcccactttttggagtgtttcacacatactccaaacatggagttgtttgttttttctttgtagatatgtttaagttgcttataaatgctggatgtttgacctttgtcagctgcatagtttgcaaaagtttctcccattctgtaggttgtttactatgttgacagcttcttttgttgtaatttattagatcccatttgtcaatttttgcctttgttgcaattgttgttggtatctttgtcatgaaatctttgtccattcctattacttgggtacttttcaatgcaaacaattttaggtcaacaataagtataaacaattttggctcaatgatattttaaaaacatttattatgaatttctatagtataatgtgtgggaaatggataaaatgtggattgtggacctgtaaaaatcttaaagttttaattttacaactcaattaagctaggcatttctaattttatatcagtgtgattcttgaaaacaatatagtgttccatggaactcttggaagaaaaaccaaaacctgtgtgatattccagacaggtgctaaagaagagaaatagaatgaatgataattactattaattgaaatacatatctcattaatcttcatagtaactgaaacttgcaaaacgtctacaacttttactttacaaggtgtgaagtaggggagttaaaataatttaccactttgtacagcaaggaacaaagatgatttaaaatcaagtctgctttactgccttactttagtgagatatctatgtctgttatcacaagggaaatggaaaggaggttgtaacattttctggctgtgctttattttttacaatgtccagagaaagtaattatcagatgttttctggttacatgatacatgatttttgctccagtttgtcacttacttgatagatgtatgcttctttttatgcccttctcttcccaatcagaaaaaagaaagttaaatcatataggataaaatgcattacatataaaagttcctgatatttttagatgtgtttcccatgagatgcctcaaagatggaggcatttaaattagtggcaaaaagtatggagggcctcatggagttcttaggaatactatcccccacattgcaggttagttgagagcctcttcaaaagaccaacgtatcctgtaaaattatcacattagaattccttttatatggattccattggcagtaatataagcagaccaataaaaaagaaaaaaatatggatttacttgattacaaaactgttaaataattctttgaggataaaatagatttagaccaagaatgtcaataaaagggggcaacagagtaaaggaaacaaagagtttcagtggagaataggagcaatttaagtgtttagagattttttagtgaatatctctctgacattgctaatttcactttccaattatataaagtgatgagaaattgttgtatttatcctttacctaaaatatatttttgaacaactctgaaatgtttttatcagatagtttaattaattaaactaaggataattactggtggcaaaaaccatatgcctttatttcattcttaaattgttcatttaaactcactaggactagttttccataggtcctatattagtaagtttaggctactataacaaaataccatagactgggtggctgaaataacagaaatttatttatcacagttctggaggctggaaagtccaagatcaaagtgtcagcaaattcggtgtctgcggagggccctcttcctggcttgcagatggccactttcttgctgtgtctttacacaggggacagagactcaaatttttctcataaagatactaatcccatcataggatccccattctcatgacctcatctacatttaatttcccaaaggcctcatctccaaataccattatattggggggtagggcttgaacatattaattttgggggacatgaacatccagtccatttaagtaccattacttttctgttactcttaggcaattaaatattcataagttacttgcactcacaaaaatttatagaaatttaaaatgtctaatcttgtgtcaaggtaaaaatcattcccctttttagaccatatagggtaacttcttgatgttgccatggcatttgtaaactgtgatggcactggtgagagtgtcttttaacatgttaatgtattataactagagtataatgagcagtgaggacgaccaggggtcactctcattgccatcttaattttggtgggttttagccggcttctttactgcaaccccttgtattagcaaggtctttatgacctatatcttgtgctgacctcctatctcatcctgtgacttagaatgcctaactgtctgggaatgcaggccagtaggtctcagccttattttacccaacccctactcaagatggagttgctctttttgaaacacttctgacatttggtgtcatttagctggtattatagtcatttagcactgatacactatggccttcaaagatgtttctttgggaccattataggtttttaggatatttctcatggcaaacaatcttctcttgccatcttcttatcaatctgctccctcttagagttcctgtcattccttctaaaggagaatttggagccagatccctttaaaatggtttatgccaactcctcctactttgtagcacttatgtagtctgtggcaaagtctcacatcttatgtcccaataaactctgggagcgcaacaaattattggaattcagatatccgttgtgaagccaccctctcacttaaaatagctatgtagccacgcaatctgagctttagacatttctcaatgtgcacctaaggtgttccccaaatatggtacacatttcaagttctctgggtggtctcctttatgctgacatcaccacccttcacctcattccccatggcaggacaaggaggtctcagagaacactatcacctctacccaaataaatcccctttataacctcatctaggttggtaagtggctatgaataacaacactgatttttagaattttctttgcaaacctggtctagggaatctgttcttcactttggaatgtgaatgctcttggcagctattattttcccatcaggttacagcctcagtgaaaactgaattataaagggaccaattttaaaatcttgttatggtgctacatgaactctttgatgtttcccacattttttttctgctatgtacccatcagatgagaatttctaccaaccctcactttccagaaagaagatcaatgtatgtttggtgcagagcaacccataactgatttctgttcaacataccatatttattcagcaaaaattttcagtttaatataaaacacagtatgaattttaatggattttagtctcctaggcatatgtgctcaagtttttttaaattatcaaaattctcttactccttctatctttgtagctattacattttttaaatgaagaaaatcgatatcaaatactccaaatgcaatttatatcagaaaattgatttggacttaagtacatgttaggaaaatattaggtacattaccaataattcaaagtataaaataaatcaccaagttagtattattttttaaaataaaatgataaaatttcattccctctttaggcaagtgactttaccatttcctgaatctgtcattgagtggtttggcaaagagctgacagatgaatctgaagatctttttaaaaaataactgcagactccttaccatataatttcatgataatcaatatttgctgaatcatctttttcttacctatataaaatcataacaaaatatacattcaatgtctttataaaactaggtactcctgagaaattaaaaattacctttaaatatattttaaaagcattttagctatagtcagctaagctatctaagttatctcacttagtttacactccttactataatgcatcaataaacttcatgttaggccgggcacggtggctcacgccagtaatcccagcacttcgggaggccgagacgggcagatcacgaggtcaggagatcgagaccatcctggcgaagacggtgaaaccccgtctctactaaaaatacaaaagaattagccagacgtggtggcgggtgcctgtaatctcagctactcaagaggctgaggcaggagaatggcatgaacccggaagttggagcttgcagtgagccgggatagttagccactgcactccagcctgggcgacagagcgagactccttctcaaaaaataataataattttaaaaaataaaaataaataaactccatgttagaagtagaaacctgttaaccaactgatagaaaaccaatcaagataaaatgtgctccttttgtctccttcatcccctggtttagttatagctagatgtatagttaatgttcataaagaaaactagtaatgaaatgccttccacccatattaacgatgctacaacatttttatttgtgttaattcttttttttttttttttgagattggtacatcttatttcattgactagaatagaaatgctgtgtagggcattcatttaaaatagtttaaggtaaaaattaccctaaacaaactggctgttatttctaactctgtaatatatattatttgtctatcaaggttaatttcaaaattctaaaacttttgtttccattgaaattctttcatatagaagtctagaagttctttagtatatagttaaacaacttatttatggattgcccaggccaggttttgtctagctgcaaactggctttactttaaaatcacatactcttgcttaagtaagtattaaggaaaggaagaaagaaaaaaacaacaaaaccaaccagagccatgcattattttaaaggtaaaaatctgctgggaatagaatttcgtgatactttcaatgatagtctatcagtgtacaaaaaggaggaaagtaaaaggtaatctaaaggaccattctttttctcattaacatctcaagaacatacagttctctagataataatatcactggtctctgctactgaaagctaaagaacttttaatctccaggaatctgtttctgtttgtgaaatagatgactgtgctttgtgagtgctgattactaacctatctaaaaacatcaaatgagattaaagttgctgaaattttagaatcaccattcatctaaggtttgtaataccattttgtagaaattgttctaataaatctacagaattcagtccttcacacattaaatgtcagcataatctctgttttaagtgtgagattcaggagtgcatgcattccttgagggtgagcaaacacttagatcctatgttaaatttgctttatgtttaacccttcaaaaatcttaaattactatatgttttatcctttctagattaatttatgtgtactaggccttttaaccactttatgtgacatgaaaaacataaaataagccttaatttttcaaaatgtgagaataataatcaaaaaaagagtagaaaagcataaaattgacagggaagatacactataaaagcagtagtttaaatccataacactttacagaggacacaacattcaaggcacctattccaggctgccaattagtaagccactggccttgtataaatactgtcattttttcatatataatatagaaataggaacacttaccttgcctgatacactcgtgttaatatcaaataagataaagaatatggaggtgctatttaaactgcacagtagctattcaaatagtataatgcctccttcatctctagaatgtcatgctttgcaaaatatacttatcactattttatttggggcacagatatgttcactgaatttaaatattatttcagttctttttaaataatatagtactgatcaataaaaagcatgtaatgacatcttattattaattaaactatttacaaggagggctgagtagtattttcagatctgctccttgacatttatcttcaagataagcacaatagacttcaagaaatatcctattagtggtatattatgaaaaagaaaagccaggctgtgggcagtggctcacatctgtactcctagcacactctgggaggccaaggcaggcggatcacttgaggccagcagttcaacaccagcctggccaacatggagaaaccccatctctactaaaaacacacaaaaattagccgggcgtggtggcattcacttgtagtcccggctactcaggaggctgaggcaggagaattccttaaacctgggaggcagaggctgcagtgagccgagatcgtaccactgcactccagagcctctgcagcagagcaagactctgtctggggtggcgggctggggggaaggcaacaacaaaagaaaagccagattacaaaaaaaaatatgtaaatgtgacttcattatttcatttagaaacaaacaccttatgactatatgtaaagatgtgaaaagtacaagaagagcacttggcggactattttctcttttggttgctattaaaatatttaacgataatttgtagacaatgagatcataaatgatttttcttaactttttatgtcagagttttttcataaccaaatttaatacattaattatatattaattttctaatgactaaaaaatattcccatctgtatttctccttcatatggaagactagtctagcaatcaagagcatagcctttggaatcagacagattggggtttcaatataggctccatacttcactagccatatgacctagcaacagaaatgaatctccctgccggcatggtggctcatgcctgtaatcccagcattttgcaaggccagggtgggcggatcatttgaagtcaggagttcaagaccagcctgaccagcatgatgaaatcctgtctctactaaaaatacaaaaaaattagccaggtgtggtggcacgtgcttgtagtcccagcaagtcaggagtctgaagcaggagaatcgctttaatttgggaggcaaaggttgcagtgagccaagatcatgccactgtactccagcctgggtgacagagggagactccatcggaaaaaaaaaagaaagaaaaaaaagaaagaaatcagtctctctgaatctgtttcttcaactttagtaataggaccaatcccatttgtttgtatatttgatggcttaatgcctgagagttaaatatgctgtcttagttcattgtgtgctgctataacacaatatttaaaactgtgtaatttataaagagcaggaatttatgttctcacggttctggaggctggaaagtccaagatcaaggtgctctcacttggtctggtgagagcccagtctctgctttcatctcacttggtctggtgagagcccagtctctgctttcatctcacttggtctggtgagagcccagtctctgctttcatctcacttggtctggtgagagcccagtctctgctttcatctcacttggtctggtgagagcccagtctctgctttcatctcacttggtctggtgagagtccagtctgcttccacaatggtgccttgaactttgtgtcctctctaaaggaaaagtgctgtgttctcaagtaacagaaggtggaggaactcctttcatcaagcccttgtataaaagtacataatcccatttattaggacagagctgtcatggcctcatcacctcccagaggctccaccttctgatcccatcaacttgataattaggttttattatagatattggaaaagacaccacattcaaaccatagtacagggtaatataaattatttagcactattcttgatatataattgaaaactcagtgtgttgactatgatttttgaacacttattcatggtgttgaattacttcttttcttccctttgcttttttacatttattcagctttcatttggttggaattactctttaatattatgcttggaaaagttatgtaggtggcattttaccttttgcctttcctttaaattatagttttgctggttttaaagcttttcagtttataacctttctctctggattctggaagggctgatcaattggcttcttgtatttaattttgcagaagagaatgctaagggcaatttggttatttcttttgtaaataacctaaataggtctaaatattatgtttcaaatgttaatcttgttttttccattaatattatccaacattaggtaatctcttttcatttaaggacttgattctttcattacctacatttgtttatgttttatttattcttgttttttctttcattgctctgctatcttccagatgtgtgtctatacatatattttatttatttattttttagacagagtcttgctctgttgcccaggctggagtgcagtggtgcagtcttggctcactgccacctccacctcccaggttcaagcaattctcccgactcagcctcaggaaataaagattaacaattatcttactcatttgaaactctatgttttcatgtcatttgactaattagtttaaggaacatgcagccagcacatgtatagtgtcccctcttgtttttttagcaatttttaaaacttttattttaagtacaatgacataactgcagggtttgttacaaaggtaaacttgtgtcatggaagtctattgtacctaatagttgtttttcctgatcatatccctcctcccaaaatccaccctctgaaaggatccaatgtgtgctgttctccctctatgtgtccatgtgttctcatcatttagcttccacttgtaagtaagaacatgcaatatttggttttctgttcctgtgttaatttgctaaggataatggcctcaagctccaaccatgtgcctgccgaagacacgatctcatttatttttatggctgcatagtattccacggtgtgtatgtaccacattttctattttttgttattttcttttattttttttgagacagggtcttactttgtagactaggctggagtgcagtgatacaatctcagctcaccacaacctctgcctccagggctcaaaaatcctcccatctcagcctcccaagtagctgggaccacaagcatataccaccatgcccagctaattttgtatggagatacggttttgccatgttgcctgctcaggctggtctggaactcctgggctgaagcaatctacctgcctcagattcccagagtgctgggatttcagacatgagtcactgtgcccagcctctgtaccttgttttatttatctagtctatcactggtgggcatttaggctgattccatcttgatgctgaataaccctatcatggggaaaaccctgataccttcactcccccaaaataccaccaactaaaatctattccaactcacctctattgaaagttcatgacaacagatgggtttacacaggggttgtgcaaataacttgaaatcaaatattagacattctgttcttaataaatttcagcaacccagacaatgggaatttctttttgggtgtctttcttactgcctttccatccctccctacaatacacacgcacacacacacacacacacacacacacacacacacacacactcccctctttctttttgaactgacgtaaaaataagagctcatccttttagaattttgtttttacttgtagggtcctttgaaaatggaaacgtttttgttcacataagtgaaaaaaaagtcttaatagtatatgttattttattttacacaaattacagctataatggaaagggcactaaccgtgaagttaaatttggatttgaatgttggcttcatgagtcaatacctgtgtggctttaaacaacttactcagcctcatagtcttctcgtgtgtgaaataagattatcagtctcacaagactgctgaggtgattaccaaggaaacgcaggtgaagatgcctagagcatagcctgcttatgtgaataatgaatttttaaaaccactgggtaaataaaagatgtcactgtggtacatggatttttttatactttataaacattctctgagctcgcattacgtctaaggcactgccctagatgctttgaaaagcaagaaaaggaaggtacctgccctccggaagtttaaaatttagagataaagacaaatgcaaaaaaaatggaatgccatgtgtaatagagatgcaaagtgaataatagtaatacttggtaaaatctgtaaagacttcacataatatagttggagcatgaactaggtctcaaattttgagtgggatacaatccatatagacaaaacacgtgcagaaaaaaaaaatcttactttttgaatctaagaaatcactattaaacggtctattggcaagcatgagtaaaacccaaagactgaggctacagatatgaccagcttggagactttagacaaaatattccatttgtcttcttctgaatctatgcctctttgtgtaaattatatgtgcagtattcctctgagccaattttgttttgcatgagccagtaatgggccagtgaacatttatttcaagaaaaacagaagtatggtgtttattatagcatcctctgtagccagaataactaaataaaagaatgagtatctccagagatctcccccaccccccaaaaaataactagaagtttcagtaagctactgaatcagagaggcaaaaaggcactattttaatttttcatattttatttattattgtagaagaaatccaattaatatgcaatttgtttcaataactgagaaaaacatcccattatggaataaaggtagtattataaactggtgtcgtttttcatacaggatgactaccaaccagaactcagtaaggcaaatatttttccagaagtagggatgtgtttgagccaaatccactctcattttttaaatccatgttctttgtgacctaacagtgaagtttgattcattgaagccactaagtgatgaaacactatgaaatttactagcaattatttctccatttaattttatgaatttcctccagtttcactaatatcatcagcaaatttttcacacagacacacacacacactatgtggtgttattaacagctttattaatctgtatctcattagtcttagccttggctaattgtaaacatcaaatccatcataaaataataagtactcagccaggcacatgtggtcccagctacttaggaggctgaggtgggaagatcacttgagcctggttggttgaggatgcagtgagccatgattgcaccactgcactccagcctgggcaacagaaaaaaatcctgtctcaaaaatactaagaagaagaagaggtattcaaatatctctgaaagcaattctgaaatacttaccccaaagtgatatttgaacaactggaaaaagtgtgtgttctccaaaataactccttttaaaaatacaaccttaagattaaatacataaatatatgctgtatttgtctaatttttggcaggaacacatcacatcacttcatggtttcttataacactctttgcattaccagctgcatataccaactctttgtgaatagggactgaatcttccatgtgtagctctgccattgtacggtaagtcctcacctgatgtcatggataggttcttggaatctgcacctttaaggaaaacaatgtataacaaaatcaattttacccataggctagttgatatacgtaagagttatgttcctacatctctcatcacaaaaacatcaccgaagttctaaatagaccaaagacttccaatattaaaattgaaataaatgtgagctatacatacattgaagaaagattagtaaaaacaagataagtgtttaccaacttattccacttcagggttacaggtggcctcagagcctatcccagcagctcaggcacaaggtggcaactgaccttggccaggatgcctgtccaccacagggtgcactcatacaatactcactcactcactcactcactcactcactcactccctccctccctcacactgggaccatggggacaagcagatgaacctaatgcgcacatcaatggaatgtgggagaatacaggagtacttggagaaaacccacacagacataaagagaacatgcaaactccacacagtatcactgccggagattcttttttttttttttcctcatcaatttataaccaaacaatgttgatcaaaatgacgtaactagaggaccttctgtgtataaggattgaggactattgtaaaactctaaagaaacaagggggaaaaaaatgggcccttggcctaattagcatgggacagcaaagaaatgagctttcaaaagattaaatataaacataagcatttcctctttcagctgaaatgagtatggtgaatattgtgtaatgatcagtgtcacagcagtcccagccatgtcccaaccatgtattttctatttcagggaggaagctattgtaactctgcagggtctcactcactttgatttatgctgtgctctcagctcctgaaaaattctttagaacaacctgagaagtgactgtaatctgattgttctctgggagcagtagggattctatgatggcactagtagtgttctgtttttttctaatgagttctagtaatgaatggggagttggtacccaaactattgagaatctggctggtattttgctcaaaaagggtgtactctccttagaaaatatactctgtactctagaggatttctccttcagagccatttcatgatggggaagcagacttttagagatttgctttttaaaaatatgtgtgtatatatattttttaaccaagaagaaaacaattctgcaaacattgctgaaatgtgtaaagacaccttcatggtatatcctattttttacttggagaaagaaataatatcaagaagcaaaagttattattcatgtttttctgcatttttattaataaattttgtaactaattctaaagtatctggctaacagagaacaatatttgtgcatttaatcaaatgcacaaatatttgattatttaatcaaagatgacaaaaactcaactagctgaaaatatttcatatctatgcttgtttttatatttactcattatctacatgatttttatttagtgtgccttgatatatatttttcttcaacaatgtgtaagattctatctcataagtcttgttctcttcttagttctaagcatttactactatttagatttgtgatgaggaaatgaggctgaaaatgatatgacacagtgaaaaaggaactaatagtgtcagcccataaaactatctcaggaaatgaggtggaacctcatagagataacctcgttaagaggagtcagaaaaatgtacattgcacatccacataattggaaataggctgtgataggaaactaggaattaccaaaatgattgcagatgtccttgactcataaggctgattttcatttagcacaccttctcatatacaggtggagcaaagcaatcaattgtcatagaatcacagaatttttaattttcaattgagttctgagttcttccaaagcagccaccgtacaatgggaccatgtttatgctacatggtttataggtacctgcatttaatagcttagactgagctttgcagttcagctgtatatgtttcaaaaagtttagaaccatattaatatgtatgtctttggttaatatatgaaatattttgaaatattgttatacgctgcaaacaattgattagttacaagcccagccaaagtgctaggccttgaactttgagaaatagaaagtactacacaaagcatgatttctaattatggggtgcatgaaatttggttgtgtcccccaaacaaattatttcagtggtaagatagtgctggaaaataagtatatacataccaaattaactggtacaagaaattagggaaagaatttaagttttttggctcagtaccagataaatttggattcaagcttcttctttgccactaagttgctgtattgccacagtaagttccttacctttgctgtgtctcacttttttcatttacaaaacggggaataatatagctataatagcataggatagctttaaggatgaaatacaataccgagaaatacagttttgcaatacttggcactctgtaaatggcagctatttacagcaactcatgaaagattatttataagtttggtgacttaatggagatggggttttactggaacattgaaatatattatgaatttcataaatgtgaaactcataggaaaaaagtcaaaataggaagcctcgaacctagaaatagtaccagatgtgaaaacttgttaaataatttttatttaaagctggtttccaagaaatataaaatttccaagcaatgtttttccacctgttgcaatctagtcaagtgtaaaattttcacctcaagtaaaacatcactcataagcacatcttgggggaaaaatacttgttagcaaaattcatttaagaaaatattaacacttcaggaacaaaaaagcctgggtaaataactggttataagacttaactttattaatatatttctataaatttattggaatattgttggacaattgtggtcattatggtaatggtacagaatgtacatgtaataaattttgatgacatcgcaatgttaataaaatacctaacaacgttgacagggagaagagggaaattaggaagcaatgtgggaggttcaatatcctcatcttttacataatgtttgtatttgaatccatctaaaattgaaaaattgtttataagatataatgacttaatgttaatgtttttatttcttctcttaacctgaaagtgacactttaaaatgtcaatacttacagtgcttaaagtggatttgttaaaaatcagtacattttttcaacatcacttcattaattttttttcatttaatctaagtagtatttatcccaaattgcatttagtaaaagatatttcttgcttcatatccagatctaggacacagctactttggcccataaggaaaaattcatttggccgtctgcttaagtttttggcacttcattcaatatatttctgttactttaatataaaagtttttaaaaagcaattctatcttttaaaaatatttattctcctaatcatgttttcatttgatgtttataatttttaattctgagtagtgagactgagggtttctaaaaattatctgtagttttcttcattgtttacattctttgagtaaacatatgtcttttatactcaccaaaaaacacacacacacacattctaacaaggcatgaactgttttctatttttcacttgaagattagtcatttttcttcaaattccatggaattttgttagacttttatgatacaatgtatcatcttcttccttgaatccattgtgtatacgtatttaatttacaatagtaaaattatattacacatgttagccgtttattttaactttcttcaaaaagtaacatgacatttagttatttgaatctaggaaagttaaattctataaaattacaataagtgtaggctacaattttaatcaaaatgcacataatttttaaagtgaatagtttaattatcatttaataatatcaaagttaatctcaaaaatttgattaaaaacacattatcaaataattaaatgcttagagctaaaaattgagaacatttggtgcttattcaacaaaattccaagtttcattgttttagaatattaaaaatcgtgttttcatgtgttatagtatacaccaaaaatacttatttcccatatactctcaatttttttcattgaacatgttcttttcacagggaaacattccctttagtttttcagcttttttgtttgtttggttttgttgtttggttttgttttttgttttgtttttgtttttctgagacggagtctcactctgtctcccaggcgggagtgcagtggtgcagtctccactcacggcaacctccacctcctgggttcaagcaattctctgtctcagcctcccgagtagctgggattacaggcgcccaccaccacgcccggctacttttggtatttttcgtacagatggcgtttcaccatcctggccaggcatttcgtgaactcctgatcttgtgatccacccacctcgcctcccaaagtgctgggattactggcgtgagccaccgcccccggccagtttttcagctttttactcctccattttgaccttccgtgaatgagactcactctctcaaatccatatccattgaagtctcttcagatcagtggtgtcttaatattgtttctaaacctcctaatctcattagaaatataagggtaataagaggatggagaggaagtttccgactgagatcaggtggttagaaaatagttacctcttcctggattgtctagaaagtaatttacgttgaaactcgcacatacattttaagcccaatataatactctgtactatagaactaaattccacttgcgtgaattacaactactgagagagaatacctagaaccgaattcaatatatcatattgtattaggccgttcttacattgctttaaagaaatacctgagactgagtaatttataaggaaaagaggtttaattggctcacagttctgcaggctgtacaagcatggtgctggcatctcttggcttttggggaagcctcaggaagcatttattcacagcagaaggtgaagcaggaggttgcccgtcacatggcgaaaacaggagcaagagagatgactggcgggcaggttgtcacacacttttaaactactaaatctcgtgagaactcactcactattgtgaggacagcatcaagccatgaggtatccacccctatgaccccaacgcctcccattaggccccacctccaacactggagcccacatttcaacaggagatttggaggggacacatattcaaatcatatcacatatttagcgtcatttcaagttaattttgtgaaggaatttgtgtaatcaaaatcctgccagtctattgaaaactttgaaaagtcgaagtcagaaattatttcaaatcgaatacactactattaataaaattacactgcacaaaatctatggttttgagagcttatagcctagaagaagcaggaaaccacgtaggtttttgtgggggtctacacataagattgcctcaaataccctgagcatgcaatgtggagtccaaagccttcccagatttcttcaaactcctagcatgttatgctgccttgattctttcccccatgtgagctctatagctgtgcgttgttgaagaaatcagagctgagtagcagttaaaatggaaaaacaaaaaaaacccagactttatttaaaaactattgcaataggggaaaagagatttcagtattgaatagaactgagctcagttccaaatatatcatggataagtggggatttatattcaagggaggcagtctggaatgaaaaattactgagattaagcatcaagagtagagggttgattctggtttaatatacctaacaggaatcttgctgaaggcaggctggagtgaccagccatcacttgggggatgaggaatttgatcagacattgaggttcatcagatatcacatttaggacgttttctttaaactgacttagcaagattctcattacaattgagtgatgccaagactaacagagacccccaaatgtagatgtctagttgggaacaggattcacaggtgccgaactaaagtttgactaactaaaacttaaactgaagagagccattgtcagcatgttatttttttttcacccagacaaacctaaataactcattcttttccccaacttctataaaaaaaaatcacttataacaaccttttaacaaatgttaatgaaaaattgtgactagtaaggggaggtcacagagaggaattttgcctcattttccattcttgttccttgttaggtatcttcccaaattatttcctggagatccaaatccttcttcctttacttgcaagaacagttctatttccatatttgcacagccactcccattcaggtttactctcaagaaaactgaggaaaccctgttaataggacccattattctcagaaagccagtagaattagaaatggaaattttctgctgacgtgcaattgatgctgtagtagcatgtgctacagttccgtgcccaggataaaatagagggcaccatgttgggagtggacagtcctactaaaggcatcatgaatggctccatgtaaaagatgactctggagctaaagcttgaaagataacatcttgtatagacggtcgccatgatcataaggtgaagtcaagagatgggagttgaggaggaaatattcaaacagatggaacaaaatgaacaatgacacagaagttccttttagctggagtgtgtgactgtgagtcacggtgtaggaatagagaggctcaggagagagaaaataaaatatgaaactatccagggagtaaggaatcaggtcatgaagaatattgtatatctgttaaaatatttgagttgaatcccttgagtcatctattctgagtcacaggaatatgttacagcatgcattgaaaatgtttaatattgaagaaccaaagtctgactttttctatcctatgtgattcctgcattgcctatatgatactctcactcagttggattgcaatatacttttttgagtgggcaagaatgggatgtaattaaagctagcatactgggacatgttcataagcctagatgctcccaaggatgtttctttcttctgaaaaccatgtttcatgtgggccagagtacaaaacaaatattgagaagcattgttttgggcattaaggattttaagcatggaagggcaaataatatttgatcttttagaaggatcattttggtagacaaataggatctacttggcagcttatcagatataactcaaagaaaaattggcaaaggtctgtattaagtagtaacaacagaaattaaaagaaggcaaattacatgaaaactattgtgaggctaggaacgagggaatgggactgaagggctcgttaactgcggaagggtaaggaagacaatgtgctcagtaatccaccctttaatgttggctgtgtttaaagccattgaaaccactttggaagaactcttgggagacatgaggcagagggtgagaaatgcctgaagacctttaggagaatttagagcatttagttctgtccaaagtaaaatccaaggagcaacgctccaaagttaagtcaatgccatgttctgggtaaatgcctcatgaacggaaatcctaagatttctgtacaatttcctcttaggactcttaaagtctttaattaactagagatctagtatcaactgcactaaaactaagctacttcaaacatactgaattatccattgaaacccacactccagcaggtgtcttgttagtcaaactgtcaccctgcctagctgacatttcaaactcaaaaagtcttgaggcactcagattgtcaaggtgcatgtgactcaaaagccacatgagaaaaagtactcaaatgtgggaagcctagggatgttggatctggagggatgtggttttgtgaatcctggccacctaattggctatgaataagtgaaatatgatccatatattgatgtacctattgatatgagatagtaaaaataattttttcaacttcacgtgcaaaacaagtgttttctttcagtctgtactcagtctcaggcattaataaatttgaaatttttctgtcatttaaggatacctattcgcagaggtgggaagatggtttctagaactaaattttaaacatacaattactcatgctcttcagtatagtaagtttatgtggctgtttattctgtcttctaaaaggagagtattctttattcctttttcaaaacctaaattcttatgtaactagaagcaaagattatattttgattaccttgtggtaagaatttaaatagaaatgacagttattacaatttattttggcttagacaagttatactatttctaaatctggccactttcaaagaaatgaaaaaatcttaatacatacagatacacattatttctcactgtcacattgaaaaatgtacatttttttcaaaatttccaatttactctaaggccagaataaaaaaaaatcatgcatataaaaagggcattgttcgaaaggtataaattctggaaaactcctaaaacagtctctgactgtccaaggtaacttttcagggtaaactgccattattaggttaagttaaaatgtgtctcaaaaaaattagtagattaaattacatttagttaaccaagaaatctgtatttattgaaaacatgctgtttgcctcagttcaggtttacattatagctcaactggcattctaaattacccactcttgcaacttgtattgcttcttttttgtttcattctttacattgttataaagtgttaccactggaactcaaatcaaattgtatcactctcttacttagtaaccttgtggctaccacctccaactctatcttttgcatctcatatacaatcagctgtggaaacactgcagtcccacttcccagatcgcttattcattcatagatgtggttgggggaaatttacaccctcttatctaggaccagctcttccccccacaccttcttctccaaggtaattcttatgagtctgtctgatatatttatttctgttttgttttcctgatgcaaaacattaaatataataagtataatgattgaaagaatctgcataattcacagaataagaattccactaatttagttgtacttctaagaataaaaatatagacatatcacaatcatcatgttttttggtctacttcaaatagacaacttcatatttattaatcagtgaggtagaatccaaactgaattcaattcttagttttgagttcttagtccttcaaattccttttacaaatattttgatattagtatatttatattcatttagctagaaattatggtccagtcctgttctcattaattaattaacttaattaataggaatgtctgagttcatgtcagggcctagaagactcatctgctgtgggaaggcatgaattccccaatgtgtctgggcatactgacaacaaacagggagagctgcccttcttaataaagtttgattgacagctgtattgtgctgagtgtgattatatggtgcctagtcctgacgggttcagtccaaaataatgcaccatgtggatcacaagcctgctttaaatgttctaccattttataattgtcaagagagagaatttagatagaatgtcagtcaagtttttctgtttacctctgcagccatgagctttggttagataatctctgcgttatctatatcacctggatttttatgaagctcataatccaaattcaattatttttatgtttttctaatatgattttagggtcccttatacagaaaaaagctgtagtagcaggtaccatttctaattcatatgaatgaaacgaatcccaccaatatggtaccctttttcagtttctataaaataatctccattccttaaaaaaatacttactgtttgtcaagaagatatatattattaatttgattctcccatttttttactattggttttggtatcatagtctcttatttaaataatagatgcaaacacagtagagaccaacagataaaatgaactcaaccaaattttctctctgcaattgacacacaagtaaggcgtttgtttaacaggccttgtgtgtatgttttgtagtaatttaaacacacagaatatactttcattttcatttgtctggaaaacaatgttgaaacctttttttttttttttttttttttttttgcctcctgagtagctgggattacaggcgccacaacacccagttaattttttgtattttttgtagagagggggtttcatcatgttggccaggttggtcttcaactcctgacttcaggtgatccacccacctctgcctcccaaagtgcagagattacaggtatgagccactgtgcccggccacaatgttgaaacattaacatgaattattacaatcactttctcattgattttcccaccaggtgcaaggaaccatcttcccagctcccaatttcaatcccataatggatgcccaaatgctaggaggagcactccaaggatttggtaagtctgattatttctaccatcttttattgtgattattttttgctttaccttgttttaagactatactgtgggtataaaatagttgatgtcttacaaaacacagatacagattagacaaaaaaaaaaaaaactgagcaaagaagtagaatgagaagaaaaataatataaaaagacaataatgatgaacaaatttgcctttagaaattgctagtctaatcttaaaatgtttgccttaaatccataagtgcctcatcactaactactaaatgaaatctccactaaaacaccttaatccaggatagagcattctttttaacctttgcttctgttttctagcttgtttcatttgctatttgctatttccacttccagtcaatcaaactttttgctattcccccaaatgactctgcttttcacatctctgtaaattggcccaatcacttctctgcctggaatgttattttcttctcttgtctacttttcatctaaattctcttcttcaagaatctgttcagatgagccttcctctctgaatccttctttgggcactgcaagctcaatcagctatgccaaccccccaggcaccttacttcctacctctcactcccctaatctcatttgcactgtgcttatgtttgtctcacctgctgactggactgtgaactcccagagcttggagtttgacatagaggtgattcataatgaatgatactaaagtttagaaaaagtatatagagagagaagaagggaggacaattttgggattcttttacaaaaaaaaatattatatatataatttttaagatatcatatggaggtattaaactttcatatagtttcctacaataaaacctgttttaagaagactcttgatgagcataaagacaaacatagacaacataaaagaaatctttgcataaggcatgcaaaaactttcataagaaagcaagctcttaactttaaagacaaggtcgcctttacaggagcttgactgtgtgtgtgtatgcatgaatgcacatctgtgtgttttattcactagcagtatcccataggaaaacaatagaggacttaaaatatgctcgctaaagctgactttaggagtttgcaatgctttcatgccttttaaaatatcagtcatcactagaacaataaaaagacaagttaacacaaagttatgaattaactttttattgaggagtgcaatttttgctttaaaactatgggtcacagcaatctgttcaccaaaaagtttttctttgctccagtttcaatgttcctgtcattgcaattttagggtcagaataaggattcattttgaccatcataatttgttgcttatcagtgtattaggctgaagtacgtcaggaggttttgggctttgattgcacggtgtccactgtagcatgccagagcatgaacacagctcaaattgctttaaagttctatccatctccatgactctggcgaagtgttattgaaaaagacaataactaatgtttttcttagctactgtgttttatttagaaaaatctgaaagcaaaaacgtattctgaaacaaatgaaagtgagtagctctgatagaaattgctttaagttgtataaaaatttactcatcatctataaaaagaaacacttattagttaacattccctaatagtacagtctactttccaatttatcaccacttgaagatactttcctgcccatgcattcttataaccatttttattttgtatctattaacatgtgtaattgctaggtcagccctgtgagatcctggacaaccgaagtcatttttaacctacattcctaaatcttgacaaaggagaacacaagtcaaaattaatcttttttgaaatgctcagtgctattcagagtggacaatctcagcttgttcctgatctttctgatcattaagtatgatgctagctataggatttttgaaaacgttcattatgaagttaaggaagttcccctctattcttagtttgctaacagtttttaacttgaataggtattggattttgtcaagtgatttttcttcatctgttgatataatcacatgatttttctcctttttcctgttgatgcaatggatgacataactgatttttaaatggtgaaactgccttgcatatctggaataaatcccacttaatcatgaaatataatgccttgtatgcattattatatctgactttcaaactttttgaggatttttgcatctatctatgctcatgagaaatgttggtcagtaattttcttttcttgttgtgcctttctctggttttggtattagggtaaggctgacctagtagaaagagttatgaagcattctctatgcttctaatttctgaaggagattgtagaaaattgatatttctttcttaaaagtttggtagaattcataagtgaagccatatggacctagtgctttctattttgtgggttattaattaccaccgacttaagtttttgatagatatgggcccattcagattgtctatgagtttgggtaggttgtgtctttgaagaaattgatccatttcatctagactatcaaatttgtggtcttagagttattaataatattttattatgattttaatgtccattgagattggtagtaatggctcctgtttcgtttctgatattcgtaagttttatctctctctctctctgtctctgtctctctctccctctcttgctttctctctctttccttaacctagctaaagccctataaattttattgatgtttcccccaaaaaaaaccagcttttggtgccatggatgttttctcttgattttccaatttcaaattcattgattattgctctaatctttcttttcttctatttatgttaggtttaatttgctcttctttttccagtttcctaagatgcaagcttagattcttgatttcagatttctttttgtttctctatatgcatttttctctaagcattgcttttgctcatctcataaattttgagtcatatttttactttcaatttgtttgaaatttttaaaaattctcttgtcacttcttcttagtctcatgtgtatttagaagtgtgctgtttaatctgtgtgtatttggggatttttccagccatctttctgttactgatttctagtttaatttcattgcagcctcagagcatattttgtatgttttttattattttaaattgttaagatgtgttttgtggtcaagaatgtggtctattttggttaatgctccatgtaacttgagaagaatgtgtattctgcttttgtggcaataagcattctatagatgttaattaaatccagttgattgatggtgctgttcatttcaatgataccctcactggttttctgtctgctggatttttaaattacttatagagtaattgacaaattactctagaggtgttaaattgcccagttataacagtggattcttctatttctctttgcaattctattatttttttcctcatctcttttggcactctgttgtttggcacatacatattaaggtttgttatatcttcttggagaactgacccctttaacattttgtaataacccttttattcctgataattttctttgctttgaagtattctttgtctaaaattaacatagctactccaactttcttttgattgcatttgcatggtatataattcttcattctttacttttaatctctctgtgtctttaatgttgatttcttgtagaccacttagtgctattaagaaataattttactcacctcagttaaaatgagttttatccaaaagacagacaataacaaatgttggcaagaatgtggagaaaagagtacccttgtacattgtttctgggaatgtacgttagtaccaccactatgtggaacagtttaaaggttcctcaaaaaaattaaaaagtgagttataccatgtgatccagaaaatccactgctgggtatatacctaaaagaaaggaaatcaatatatcaaagacacatctgcattcttgtgtttgttccagcactatttacaatagctaagatttggaagcaacctgtgcatcaacagatgaatggataaggaaaatataatacaaatactcaacagagtacaattcgaccataaaaaagaatgagatcctgtcatttgcaacaacatggatgaaagtggagatcatatgttaagtgaaataagccaggcacagaaagacaaacattgcatgttctcacttatttacgagatctaaaaatcaaaacaatttaacacatggacataaaaaagtagaaggatgattaccagaggttgtgaagggtagcggagggctgctggggactcgaggatggttcatgggtacaaaaaatagttggaaagaatgaataaaacatactatttgatagcacaacagggtgactatagtcaataataactgtgtattttaaaatatctaaaactgtgtaattggattgtttgcaactcaatggataaatgcttaaggggatggataacccattcttcatgatgtgcttatttcatattgcatgcctatataaaaacatcttgtgtaccccataaatatatatacctattatgtaaccacaaaaattaaaagtaaaaaattaaggaataattttaaattttagtaataattatgttcttgcctaggaggccacttttacctatttgaccatacagtcgattctcattattcacaaatgctatatttacaaatttatctactcactaaaattgttttataacccccaaatcaatatgcacagatatttcgtggtcatttgcagacatgtgcagagaggtgaaaaattttagtcactagaatgcatattgctggttgaaatcaaacaaggtgacctctgccgtcttcttttagctttcatgctgtaaataagtcctttatgcaatctatgtagtgacacaattttgcatttttatgctttgcttggtgattgtgctgtttaaaatggccccaagcatagtgctgaagtactgcctagtgtgttcctacgcacaaaaagaagtattcaagaaaaaaatatgtgtgtcacataaactaaattcaagaattagttatagtactgttgaccatgagtttaatgttaatgaattaataaaataatacatccataaaaaataatagaaaatgtattgatctctgcacgatgctgtttggaaaatgctgaagtaacatctattctatgttatgaagtatggaaaagatgaaaaaatggctgaatttttgggttcttgagactataactgataacaaaattaataattttaaaaaataatcaaggcagtcagctttcttttgaaagcagtgttgggtggcaggttagaaaaattctgtagatcaggaggctacagaagagctttaaaaatatctcttaaatgtttatacaggagaaggctatctggaagtatagttttcaatgctaacaagactggcttgtttcataaggacattggcaaacaaacataatgcaaatgacatttcagttgacaaaaaatattgtaaccacagggttacagaaacctaaccctgcattttccctaggaacaatagttcagtatttactaattcagtgttcatggcaaatttgtagaatataaataccacatacaatgagtcacttgtacaaaataaaatttgataaaattatgatggttcattatgcccaaattttccattaaaatcagaaaaagataaattatttagaaatccctgacctaaagcactaggagaagaaggagaaaaacttataatgattacaaagaagaaatcaaagttgtgattatatgaagaagaggttatatatctagaaattcaagtttaataaaaagttacttaatattataagagagttcagtaacttctcaggatacaaagtaaacacaaaaatcagtatcacttcttcaattaagcaattatgtgttaggaaataaaacaaaaataacataactgggaatatcaatagaagtgcaaatataagtaactttagcaaaataaaccttcttgtcattagcaaaaagctccacaaatctttactaagtcttttagagaagaaaaatccttaaataataggttggcagaaatatcatgtaagtgacagaaagacaacacttacaaaattgattcctaaatttacagttattttaatttaaaaattgtaatacaattattgagattcatataaaatatctctggaagaataaataaacaagaattgctatgaaaacttaatagagcaattcagagcgctagattgtggataatctcaacagaacaagaacaaaaagtaagactataataatttcataaatgtgataatagtaagaataagacaaagaaagtaattttaaaatcttctatttattatcaaatatatgttcactttagaatgtccatcatgccattaacagattcctctactggttttgttttgttttgttttttgtttctgccttttagttcagggtcttaaccaggcttgagccagacatcatctttctctatgccttttcagtggagtctgccttttctctcagtagccattaatttctatctttgaagccaattctaggccttcctccctccctgttacagctttcagaccatttgtgcataaaataccctgatgctccccctgcttttcagtgatacagtcatctatgttaattcttaacacttgttctcatttgctggatatttcagcaccttattcatagccttcctgtgatcctaagcccatccaggagggacttaatttcaaaaaagatgatttgcttaacattctagcttttcaattcatttttctccttatctccattatatatcttcccttgttgaagaaaaattataccagatggaattaaacagcaaggaagattctgcagtagggatcaagactattgcaagaagggagagagagtgaactcaaatcctatgaaacaaaggcaagagagtttttaagcagtatggtgagatagtaggaaagaactaaaggatgttgggcagggagggcattggtcaatgtgattaggctatctgtgattgctaattggcacttaacaaagtcaggttcctgtcctcacacagacactgggaaataggaaatacagtttctatcttcccaatgatgacatttcaaaaggatggctcccatatccctgagaaagacaattttgggttgtcaaactgcaagaggctgggaggagacttacatctctaagaggcagagaaagaatttaaaattgcatgttttctaaaataaatgctctaataaaagggaggttaggagcctgtagttgggaagaaacttatctaaattttagtcaagctaagggaaaagttaatgtcatattgctgactctactatgactgcaaaattcatctaaactagttgtgcactaaaccaatctattagcttggtgtgttggcacatgaggaagtgaaggatacacagaccagaaacagtctatattagggaggagatagacagggtgataggtgttccatgaaaagcatgacaggttcactctatccctcagaagcacacagatgccttgtactttcatgatttccttctctattactcctccctccttaatatatgttcattataagccatatctctctattcaacaagaaagacacaatattagtcaattctcacactactataaagaactacctgagactacataatttataaagaaaagacatttaattggctcatggctttgcaggctgtacaggaagcatggctggggagacctcaggaaacttacaatcatggcagaaggcaaaggggaagcaggcacatcctacatggccttcctacaaggaggaagagaggaaaaggaattgcgacacacttttaaacaaccagatctcatgagaactcactcactatcagaagaccagcaagggggaaatctgcccccatgatccagtcacctcccaccaggcccctcctccaacactggggattagaattctacatgagctttgcaaagagacacaaatccaaaccatatgattctgcccctgtccccccacaaatctcatgttcttctcacattgcaaaatataattactgattctcaacagtctcctaagccttaactcatttcagcattaactcaagagtccacagtccaaagtctcatgtgagacaaggcaagtcctttctgcctatgagcctgtaaaatcaaaaacaagttagttacttccaatgtacaattggggtacaggtattggctaaatactctctttccaaaggggaaaaatcagccaaaacaaagggactagaggccctatgcaagcctgaaacttaacagggcagtcattgaatcttaaagttcccaaataatatccttcgactccatgtctcatatccaggccacactgatgcaagaggtgggctcccaaggcctcaggaagctccgcccccatggctctgcagagctcagtccccacggctactctcaagggctggtgttgactccctgtgcttttccaggtgcatggtgcaagatgtcagttcatctaccattctaggatctgaaggatggtggcccccttctcaaagctccactaggcagtgtcccagtgtgggggctccaaccccacatttttcccccacactgccttagtagaggttcctcatgaaggctctgcttctgcagcagatgtctgcttggacatccatgtgtttccatacatcctttaaaatctaggcaaaggctccaaaacctcaactcttgctgtccatgcactcacagacttaacaccatgtggaagccttggcaattttcagcttgcaccctctggagcagcagcctgggatatatctggggtccttttagccaaggctggagctggagcagctgggatgcagagagcagtgtcccacagttgtgcagggtagccaggcagggatctaaatccaaatatcagatgttgctcccatttaaacactaatcagcttaaaggtcaaggagccatttttttagtggagtaagagctgattgaagagacattatattttcttcactcccctgtacttttgattggatttttattttcctttcaatatttttttacaaatttaaggggtacgagtgcagatttgttgcatgcatatattgcatacttgtggagtctgtgcttttagtgtacccatcacctgaatagtgaacatcatacccaataggtaattttttaacccttgcccctcttccaccctctcactgtttggagtctctaatatctattatcctactcaatatgtccatgtgtacccttcgtttagctcccacccatcagtgagaacatatggtacttgacattttctgagttatttcacttaggataatggcctctgattctatctatgttgctgcaaaagacaagatttcattcttttttatagctgagtagtattccatggttccatggtgtgtatatgccacattttctttatccaatcatctgttgatagacacttaggttgattacatatcttggctattatgaatggtaatgcaataaacatatagatgcaaatatcttttttatataatgattactttccctttgagtatgtacacacagtagtgaaatttctgagtcaaatgatagttctatttttagttctttgagaaatcttcatactgtttcccacaaagatcatactaatttacatttccaccaacagtctttaagcattcctttttttgcacatcctctccaacatctgttattttaactttttttttttttttttcttgagatggagtcttactctgttgcccaggctggagtgcagtggcgtgatctcggcacactgcaacttccacctcccaggttcaagcaattctcctgcctcagcctactgagtagctgggactacaggcgcccgccaccacacccggctaattttttgtacttttagtagagatggggtttcaccatgttagccaggatggtctcaacctcctgacctcatgatccacccacctcgaccccccaaagtgctgggattacaggcatgagccatcgtgcctggccattaactttttaataatagtcattctgactgacgtaagatggtatctcattgtggttttaacttgcatttatctgctgattcatgatgttaagcatttttcatatgtttggtggctgcttgtatgtcttcttttggaaaaaaaaaagtctgttcatatcctttgcccactttttaatggagttatttgttttctcttgttcttattgcagtagcatgctgttttgattactatagccttgtagtatagtgtgaaatcaggtaatgtgatgactttggctttgttctctttgtgtaagattgcgttggctattcaggcccttttttggctccatatgaactttaggattgtttgtcataattctaggaaaaatgacactgataagctgatagtgattgcattgaacctgtaaattgctttggatagtatgataattttagtgatatttattcttccaattcatgagcatgaaataattttccatttgtttgtgctatctatgatttctttcaagtgttttgtagttacccttacagagatctttcacttccttggttaaatgtattcctagatattttatttatttattgtaactattataaatggaattgagttcttgatttggttctcagcttgattgtttttggtgtatagaaatgctgctgattttcatacgttgcttttgtatcctgaaactttactgaagtcatttatcaaatctaggagtcttttagaggagtctttatagttttctataagatggtaagatcatatcatcagcaaactgagatagtttggcttcctcttttccaatttgggtgttttttatttttttctcttgcctgattgctccagctagggctcctagtactatgttgaatgggagtggagaaaggaaatatctttgtattgtttctgttctcagggggaaagttttccctgttcagtatgatgttggttgtgagtttgtcatatatggcttttattattttgaggaatgttccttcaatgcctagtttaaagtaatggcactaaattaggagataggaaggatccaggcttcatcaagcatcattacatgatttccaattttagttaaaattgttccctgctgtaaaataccatcagggataatgcgtgcatactggttatgatcgttagataaaggattcttcccaactacaaagtagcaactttactaatcttcaaatattattcttttccagactgtgacaaagacatgctgatcaacattctgactcagcgctgcaatgcacaaaggatgatgattgcagaggcataccagagcatgtatggccgggtaaggccactttatcttgacctatttctagggcaatctcttgagaactaaccacactcacggataataggtattttttttttcaatctcacagattgcaaatatctcagacatcattatatgtcagatacagttcatattcctcttacatgtttcaaggaataaaatctatattatgaaacaaatatacatgtgagatatgttcacactcacagtgaccagtgaccacaagttctttccccaaaatcattcagtgtccccaaatgaaaagttttgatgaacttacattgccagtgggtccaattaggcttaaagtgttgtgctggaaacacccctgtggcgagctttagggaaggcacataaaaaattaatgatcaccagttcaaaatataacagcttttcctacagttccttgcaggtcctcacctaactctcaaccaaagtgaattctctaccagcttttcctttcaccagcatgcagctatagagaccattaaaaaagaatggcagtttaaaaatagtttaaggcaataaaactatccatagtgttttaaagtaatcatactctaatttcaaagcaagtaccattaaagattccttgcttttgctatgcatttaaaccacaaattcagaacaaaaactcttcaggccaaaagtgcctgaaacaacaattacttcatcagctgagctttatcaatgaaacattatcataaaactttctcagtagagttaatccatgtaaatttactccacctctaaaccccagtctttgaacaactatagtagatgaaataaaagatatccctcagctttagattgaattaataatccaaaagctactatcagtagtgaccttagttgaagtaagccaaagtagaagaccagtgatatcttcttttccacataaactgttacctcagcctatgttccacctacaccagtactagttttcttttgaaagagaatataaaaactataaaagttgtatcactggtaatctaacattgttttaatatgcatagtgctataagaaatgtctttttttttttttctttgagatggagtttcgctcctgttgtccaagctggagtgcaatggcgtgatctcatctcactgcaacctccgcctcctgggttcaagtgatgcccctgcctcagcctcctgagtagctgggattacagctgtgcgtcaccacgcccagctaattttttgtatttttagtagaaacggggtttcaccatgttagccaggctggtctcgacctcctgacctcaggtggtctgcccacctcggcctcccaaagtgttgggattacaggcgtgagccactgtgcccagagaagaaatgccatttttaagtaacttttttttaacccaaaggtttacatacatttttgctttttacaaatcaggttaaatttagactgaaaacattactttatcaagctctacaaaactatgctaaagcagattaaaacaattttaaaatgaagtacttacactcaaggaatttaaaatctactaaagaatttatactccactgaagaacttttcactgtacatataaagtctcagagtttgttaaaccctcagttttgctgaataattcatacctcctggaaaaccttggctgatacactaaattgcactgcctggaaaactggaagtcatgtttgcctctttcctctgaaatacccttgtcatttataatcaattagcaagttctgtaaattatttctcttcacacatttctctctttaaactgacttacacagtcttgatttagatcttcatcattttgtgcccagactaatgctgaaattcctaaatggtcctgtctacccctagtcccttcccactccagtctatccccaaaccgtagccagaatgactcaaaatctaaattttcacacatcactttgccactttaatccttgagtgtttatcttgtttctccctacaaacatccgtgtttccatgcgctactaaaaagtatggggaatcctcggtccttgatcatcttgggagtaagataatggccaagtgacaattcaaagacagcagaaatctttacttgaagggaaagagggagcagagagtttatttaaagagacaggacattctgaaagatgaggcagagcaggctgctgaaagagaatgggccaacagagagtcctgggttgggtttttataacattggatttttcttcacgttccctgctctgtctcaagtctctgccttttttcattatctagtttttctgcttctgccgtaagcccttgccttttccctgcctagtttccaccccaggtttgtggggccctcccttactattagtcagtgcgcatgcgtgggccaggggttggatacgaattctatctaatggctgcactgctcattaccaccaccccagtaaggtcgtacagcagtcaaattggtacttgtgcctatatatctcttaggaatttctcctttttccttttcctttctttctgctcacagttgactaattgtccacccgctacagcattagggattctattaatatgtaagcggtgggtggtcccttgggcctaagacttcccaagcttttcctttctcaagggctccccttgagtaacccgctcatgtctagccatctgcctacacatattcctacacatggaataaacctaatgccttcccagggcacacgaagccttgcttgctttgttcctgctctccgtcttcatccctctccccttccctaacacaattttcacctgcagtcaaatagaactgctatacttgtagttcttcaaattaaccatggctgcccctcaccaccagtcatgttgttttatctatcttcaataacctgatttcaataccacaggctggacacctatcatccttccaggtactagacacaagacctcacagccccccaccagatcgagtggaacagacttgggctgctaatacatcctttttgtaatttcctcacagtaactaatgacacatctgagagcttgtttgtatctgtttcactctaccacagtctaaagctttgaaagctgggatgattcttgttcatcctagagcttaccataaatgtctgtctagcataccaagattgcttaattaatgtttattgaatgacattgtaaaggtgcatctaactacaactcctccaataagacacaggcaggctttgactgctcctgtaaactttcccagcctgtcatgctcaccctctactctgtgtttcctgcttggttccaagagatccttgtgcataatgctactgggttgtgctggttcacttttacatcttgccaataacactgtaatctcctggaaaagcagggattgtaatatttgctgctatccctccagagcccagcccaggtctggcatagaagaggcatttcatttacagaatcagtgaatctaaggcattatattctgcctatttacttttttttaaagaaaaggaaaagcatcctttcattatccactctgtagttaaaatgaatctacaccaattgcctagatttcttttctctcattccttgccctggctgctaccaggttaatttctccgaccatcagtaaggtcttcttgacatctaccaccgctcacatttaggactacttcttccacctggccaaggtgtatctcctgctacttttccctttctgtggtaagaatgtatacattaacccctatgttaatcaatggtattttaaattttcattaacaagaataatcaagagttgacagaatcattttcttagctgctgagtgaagtacaattctcagcaggctccatgaacacttcttacttgacattttacattcgtgcagagtggctgaatttcatcagctttgccttacctattgcagaaactaatccctagactcaactgaaaatccacttggaattccgctgattgacatatttatcaaagtaattcatgaggtcacttctgatcttccccaccaaagcaagtgctagttaaaaacaatgcagtgacaccaagggaacaatgaaatgcccttgtgaatggggagaagaataaacagacaatgattcttggagaagttcaaattcagcattgatgcaattaattttctcatttttcatctaaaacagggactatccggtctaaaatatgctggtttctgtcattcatttaacccacatggttggttaagcaatttagtgccggggctgacttgcccaaaagtaaaacttcaaccaaggtcatctgactattaaattgtctcttccacagcttctcagtaatgcccactgttctcaatggagcaaacactcaggcttacaagggcagacatctatactgccaaatccctcacatctttcaaggttttgcttaagtgtcaaatactcaagagggcctaatctaaagctgtcactcaccccaagccctatgctagagctccagatacccctcacctgacccacaggaggaagtccagggcaagcctatcatctaacagtcttggccagtgagttaaggcaatcctgaatgccttctaaggccaaaatggtgtaattaagtgtcctctctccaggtgccaagattgttgttcttttttttttccttttctttctttgagacaaagtctcgctctgtcacccaggctggagtgcactgccgcgctctcagctcactgcaacctccacctcccaggttcaagcaattctcctgcaacagcctcccaagtagctgagattacaggaccgtgcaaccacgcccagctaatttttgtatttttagtagagatagggatttgccatgttggccaggctggtctcacactcctgacctcaggtgatccacctaccttggcctcccaaagtgctgggattacaggcatgagccactgcgcccagttgttgttcttacttaccactagaaaattgacctgttccattccagtagatataacttcagtttttttctatcatttccaactgatacctagaactttaatatggaatggtcaggtgcaagagggacaaagccatttgtatacaatttccggaaagctattatgtcccacacatagtgtaccacacatagtgtacccacaacaatgatccttaaccttatgatctgggatgatgagattccagagagaatccaagtgactgaaccagaattgagtttgaattcctatgtccacttttgattaggctgctacccagagaatagaccaactaggacaccctgaggttggtattgtaatcgcccagtggtttctccttgccctgtgacaagacagagctggtttatcaagacaggggaatatagagtttaattcacacagagtcagctgtacaggagacaggagttctattatcactcaaatcagtctctccaaaaacttggggattgggatttttaaggataatttagtgggtagggggtcagaaagtgtggagtgctgattggctggtacagaaatgaaatcatagggagtcaaagctgtcctcctccactgagtcagttgctgggtgggggccgcaagaccagatgagccagcttatcaacctgggtgttgccagctaatccactgagcacggggtctgcaaaatatctcaagcactgaccctaggttttataatactgatgtagtattgcttcccggccttttggataagatcaagtgtataacactgatgttttcctgaggaacaatttagggaggttcagaatgtcacagcctccagctgcaagactgctaacccataatttctaatcttgtagctaatttgttagtcttgcaaaggcagccaaggggatttgttttagaaaagggctgttaccatctttgtttcaaagttaaattataacctaagttcctcccaaagctagttcggcgtatgaccaggaatgaacaagtacatcttggaggttagaagcaagatggagtcagttagccagctctctttcactggaattgcctcggttgtaagttttgcaaagttttgctaacaccctacccactaaattatcctttcagtattaagagaaagaaagaagcatcatgcttagaaaaggtcagagtgaaatcccaaattttacaaataggtttatatgacccttttcctccatcatggtcattttccaagaaattgaaaggaggttaatattttccaggaaccgctgaattcagggaccaaacttccctactaagctaagtaggccagatgaaggtcaagaagatagagtcagaagtcttactgagctgatcaatttgcagcaataccagaagcctagggatggtggagatcatcaaataccttgactcttagtctattgttgagtggctttttttttttctttgagacagagtcttgctgtgtcacccaggctggagtgcagtggcatgatcttggcttactgcaaactctacctcccaggttcaagcagcctcctgagtagctgggattacaggtgcatgccaccacgcccagctaatttttgtattctcagtagggacggggtttcaccatgttggccaggctggtcgtgaactcctgacctcagatgatccacccgccttggcctctcaaagtgctgggattgcaggcatgagccaccatgcctggccttgagtggcatttttaataaaactgcatgatggtcagatttcaagtagtctagaaagccaaaaacatggcacagattattttcatgggccacagtgatgtggcggaagtcagctgattgacctgaaacagcaatattgtaacttgaaaaagtgttatcatttgtgaggacctacagaactctatgaggtaatcaaagtctgatgcaatccatctgccagaactacaggggcaatatcctatgaattgtgatttcctttgccaggaaaaacgcaagtcaacctttgacaaaagtgacaagattggcaagcggtggtaaccttggcgtcagaaacatagaatgctttaccatatgcccagcttttgagggtatatgtgttgtgatgtccagtctgatgatgaatacaggtagcaattgtgtgatctgagcaacgcaggctggatcagcacctggattccagttggtctcatcagagaatcagcccttactgtggacagctgcaagaaggacacaaaagttatcagaacctgcatttttccccccacagactacagaaggaaacttctgtttaatatgcagtttgtgtttttccaagagttaacccaaagagaaggctaacagcccaagagtgaataaaaacattgagtttatcaaagggaacactgttcagagctataatagccttgatttctgcccatggggcaataatcattctttttttgttctgcacaggtgtttctgagttgagtagccacagcatcccagtggacactatctggtttcagcttatctgaatcgccagtgaaccaggccatggcatttagggcaacagattgaggtccccattgaatcagcagcttgctgatttccccaaaagtttcccccagtggaatagctaccatttttttcatgtaaatgcaagacactgcagggtccaggcctactggattctttgatgtaccacttctatttgacaggtgagactggctggtttcttccaccttgccattcattgagtcccagttgatttaccctaatatgggaatatcaggcatcagggtcacaaggcctccatggatcaggcattcagtttatacaagagtccaatagcaggccagtagctgcttttcaaaggggatatacctggaattgtatcaggaaggcagcaagtttaaaacatcaagaggcgcctttgagaagctgctttcccttgccagaggctccaatcagcaaaccatctatcatagaaacttatgcctgaaagtgatcattaggcttatggggcttcataggtagtagcacttcttacatatgctgttttcctgtggaaagcatcccctccagtatttaggagcattcacagaagaaacaaataaacatgaataccaagtacgttcaacagtggaagttatactagtctaaaggtctccaatcataaggttttttgactttccttctccatttcaaaccttgttcaaacccatcctttgaattcgggtttactttcaccgatgagtccaggtagaatggtgacatggacacctgcatccaacagattcacatatccttgagtcctcctgctccacaaaggcaaatgggcatggccctagtccacaatgggaataggaagatctgtgtcccaccctcactcacttttttcctgaaagcagtagaagttggggtagagggaaggaaaagttcaggggacatgagggagacagaggctctgcattagtcagcatgacacgttgatatcctgtacagtggctgtgcacacctcaatcaaatgaatttccaatggttttggcctacacaaagtcctccatcaggtgcaacttcatcattactgaccccatgtgtttcagctttgtgggcccttgagccagaggtcagaaccacagttatttctgtcacagccaaggggtttgagtcctttgagtgaattgggtttgacccatatgtgacaattttttttttttttttgagacggaatcttgctgtgttgcctggagtgcagtggcatgatctcagctcactgcaacctctgtctcctgggttcaagcaattctctgcctcagcctcctgagtagctgggattacaggtgcccaccaccacgcccagctaatttttgtatttttagtagagacggggtttcaccatcttggccaggctggtcttgaattcctgaccttgtgatccacccgccttggcctcccaaagtgctgggattacaggcatgagccaccgtgcctggccatgacaattttttaaaatgagtcagtctttgaaatggactctatcttacttgctaacctatgttcacaataacatctcttacctcaagttttttcctgtaattgacataggagctggggaaattttctaggcacatattattattgatcaatatttttattccaccttgttttatactccctcaaattagtcattattatgccattgtataagttagtgtttctttagttttatttgtgattcttaatttatttgtacatttttcttctaatacccaattctatgtttctgatttcgatgtgattttttttcaaaaggacattcattagcagttcctttttttctggaaataacaaataaatgttaaattatttcaatctttccctgagaatatttttattatttcctcattgttagatattagtttagatagctatagaattctgggtggaactctagttattttcccctacatctttgcaaatataacttcagttttgttttttgttttttctggcccttatcgacacttctgagaaaactcttctgacatcaagaggtattattttgtttgttttgatccttttttctatagattctctgttattctctggatgcttttaagatagttttctttatttttggtattctatagtttcactgtggtagtcaacaggcttgtacatttttgtctaaatagctgaggattcacgtattctggaagactggaaatagtgtctctccagcattgtccacattctctcctactgtaaatccttttagaccaaagtctgtccgtctcattcaccctttcaagtctgttaactttatgttaccatataaataccatatatttcttgtccacatatgtagaatatttttgtcactttaaaatgtattttcccaatgtgctgatttcattttcagttttttactagctactctttttagtttttaatttctagaattttatttgctttctttaaaaagtctgttaactttttttcatagtattccctcagattgttattaatgatctcaaattcatggggtttcaattctgattgttgcagagtccactatatcacctaggagatgggtcttgttttttgtttctttagggagaatctttttctgttctggagtgtcagagaatttctgaagattggttttgcatttgcttcttctgttccatgagaatcactagtttgagatcagctttcatgatgatttctcttcatggaggtctcagttcatatgagttaaataaatttgaacttcaagcctcaggaaagcacaggtctattgtttcagattatcagggaaaatgttctcctactcaaagcctaggcaatgagtggtgagcgtgagctttctgccaatctttcaatgctgaataatatttttcttctagttcacgctgctactgaggatacaaccctttgaggatagcaacctcatatgtgagatttcagacttgattccctgtgttacattgcccagtaaatgttctcttctcctcatacagtgcccgaaattaggcactaaagcctaaaccaaatagctctcaaaaccagcctctactttccccagtcacctgcaggatcgtctccaaggtcagctcacttgcttatcttctggttttcattttttcctgatttttacatcaagcggtttctctttcttctgaaatcatgtatactgttaaaagtatttctgttactttttatcaggtatttgaaaggggagagtttagatttaatataccatgtgtgtctagaagaccaaagtattatcattattatcaaacaaaaaaccccaaatttcattgaaaattaaataattatgtaaactgcgaaaatatctgtaaaatgaagctattcgaaagaatattctcttaccactgcaaagtgacgaagcaacttgcacaaacatttttataatactgtcagctgaagaataacaaggttcataaatttggaaaagaaagctttatgttttataaaaggttgcagcctgcagggtggccattctgacaggctgggaagcatggtctcctgccgaaaactggaaacagacactttgatagccagaagaataagacagaaatttatgcagaacagggtggctgaatatacatattcaataagctataggagtcatgaatatttatgaaaggagaaacacgcacatgcgcagttaagcttcatacctctccacaggacccacgttcaaaacatggtggtgttagcatgttgcgagggtggaattttcagccctctgacactgaaaggtgacagaaaaccctcactgcacatcctccatagactggccagaaccactaagcggtcagtggtctctagccaggaaagaatgctggctggttgttttgtctaaaccacaaaaaggagaggcagtgtaagagggttggttgatatcaggggtggagtaagtctttccaaagggctggtttctggttaactcttaggaaagaaaggcagtgagctagggagggggtaccataaggtgtattctaaattccatcccatcattgctaggaactcagttttcaagattgctctggggcccccttggccaggaaggggttcatccagtcagttgagggacttaggatttcattttaatttttcaatataatataaaatgatgcaagtatttacatagtgaccactgggggagggagatagaattaagataaattctaaatttcactttatacagcatgcatcattgatatttaaacagcaaagaacattttaaataataatagaaaaagccatataagtgaaaagcatatgaaactattcccctgagcatattcagacaagaaagatgttagtcttacttctatttcttgcccctgtttatccataataagataaaggtaagacgaataagaaataagaaaatgccattttatttttaatttaaatggagtggttagaatagctgcagcaagggtagtctgcagtttcattggcaacacagaacagctcaatttgcaaagcaagtactcattagcttaatgtaaggccaagctgtgattccagcagagtctgctttagggcaagtcttcggaatacaggaaagcagaggcagtccagctggggaaagtcacgctgcaaaggttgcatttgaaaagtggtgtatatatatataaatcctagtgagaatttaatactctaattagagaacctatttgaaggctccactttgaacttgtaatgttcagttatttaaacatgttattcgatatttatcttcccaactgaaagtaacacctccttccagtgtcctgataatagcatgctattcccattactatagcacttaccaaattttgtattgtaatttaattgtaattcctgtatttctctccactgaagaaaactgcttgatgataaggaccttcacttatttatgttcaaattgccaagaatgactccaaacaaataattgttgaactacaagtagtcctcattcactctttcattcactcattcattttgtacctatattgtaagtgacgactatgtaacaggcacagttctatgggctggtgaaatagccgtgaagaaaacagaccaacagctctgcatgatggagcttacattctacctattccacctgggtgggagagatcatgcatagaaggcaataaatgctttggaaaaaaagcagaagccaggtaagaaatacaggaagtgtggggagatggggtgtaattttaaacaggataaacagggcaggcttcactaagaaggcagagggggtggaccctgtgaatacctaggggaagaacattaagggcacagtgaagggcaaaagtaaaggccctgactcccacagatctgctattccaggttcagaaagaagcccgctgtagccagagcaagagaaatcaggagcaaggagaattgtaggtgatgaagtcaaagttaccaagaagatattatgtatcttgttgaccatgtaaggactttgtcatttacatgggaataaaacactgagtgttcattttcttctaagatcaagtgtataaaataatggtatagtttattttggagtgtggcttgagagaaaacattttgagcagaggagtaactaatttgatttttattttcccaggatcacactctcaaggttgttgaaggagattgcaaggtacaaggacagaagggaaactcgcttggaggctattatatatacataataaataagtaaattacatatatatatatgtatcgcctcccagcaattctatttatataaaatatattttatgtaaataaaatataactcatagggcttatttaatatttaatatataaataatatctatattatatatataaacaatatatctattgtttttgagacaaggtctcacagttagtcactaggctagagtgccacgggacaatcacagctcactgcagcctcaccctcacgggctcaggtaatcctcccacctcagcctccaagtagctaggactacaggtgcatgccaccacactcagcgagtttttggcattttttgtggagacggggcttcgccatcctgcccagtctagtcttgaactcctggactcaagcaatctggcggcctcagcctcccaaaacacaggcatgcaccactgtgcccagccagaggctattatattaacaaaggagagtgatgatggtggcctgggtaaagatcgtagcagtaaaagtagtaacagttcatcagtttctagatagatttgtaagttgcagacaatagaatccattgacaatcggatatagcaggggtaaccaaggagaaaatacagtcatgggttcttagtttctgtttctggttgggccaagaaagggccttccccatccctcttttctgcttatcactagagagagaaactaaaaaccatggcttcaagctgctaaaagcctaaagcaaaaaaaaaaaaaaaaaaacaaaaacaaaaacaaaacaaaaaaaaaaaccaataacaacaacaaaataagacaggttggacaagcttgggatatagtaaaggttgcaaaaaatacgggaaaactgtgaggtgaagagagacagacaaagatgggggacggtagagaaggaaacaacctaactaatcatgttttatttgcaacaagttacttaaggttttgtggggttggaaagacatatattgaatgcctataatatgccataaaatattttcagaattttacctgagttaaatcttttaacatttatatcaactctgcgaggcagatgctgtgattattttcactttgcagattgtgaaacagacacaaagaagttaaggaacatatttagaatctcttagctggtattttgcactgtgaggattcaagcctaaaaaccctacctccagaacctgtacattcgaacattagatgatatctgatattgtttattttcctgaaattatattatttcttttttttttacaaaattagttcactgtaactatagctatgtatacacacacacacacacacacacgcacacacgcgcgcgcgcgtgcctctgagttgaaaacaaagatacaagcgccatctactggcactactaatctcagtctacaattcagcattagtacaaaaatatcatatgtaaagggaagaaatatgttgtgatacatgtgtagggtgggagtagtgatcaaataaatgtgactaaaggttaaataacaaacttttgcaatgcttgcatagtcttcagcttgaacattgccttttttatcctttaccaagtttttctttatccacattcatccattattctttcatttgcttatacattcatgtatgtattatttataagctgtactccacatattttgtgcactcagtactttgctagagctagatgctgaattttgaagaatttgtgagaaagtccatgtcctgatagacttttgggggaaatatgcacatatatttatcatataatgtggtcactgaaatataataaacgcaaagataaagcagtggtggccaggaagtaatcaatttcacttagggatagaagaaggcccatggaagagatgatcattttaatttttctacctttctatcaactgtcaagtgccactatcctgtagagataaaagtatattgaattgatccatttgcattcaaaccttcaacgcattgccacaagatttattttaaaatgcctaaaatgtgccacaggtaccacctatttgctatgttcatcactttggtcgcatataattagtggcttcctatggtgctagctatgtcacctttgtgtgcctgattttcttatctacatagtggaatgaatacagttcctaactcacagggttgttgtaataaattattacagttattctaatattcagaataccatctgacaaatattaagtattcagtaaatgctagttgttatgataatcatcacattcttctgcctggcctactcaactttccattattagggcctcatggtataccctttgcactacaaggacatccaaagtctcttttgaaatattcagatttcaaatcaacccaacatttactgaaggctagctgtatacttcacaggcacgtttcactctacccagaacagtaccttctctgtcctgaaacattatttattgttggtatctcctaagcctttgcctgatcaaatcccactttatctttcaaagctcacctcacaactacgctttccacgaaccttcattttatgaataatatctctaatttatacattcgtacaattctgtaagtttcaaagccttgcccttatattgcctctcttgttggcccttagtaatatatatattatattatatgtattacattatatataatatattatatattatataatgtattatatattatattgaatgtattatatattatatattatattatacattatattatatataattatatataattatgaattatatattttataatatataattataaattatatattatataatatataattatatattataaaatatataattatataatatataattatatattataaaatatataattatataatatataattatatattataaatatatataattatataatatataattatatattataaatatatataattatatataattatacattatatagtatattatatataattatatattataaaatatataatatattataaatatataatattatataatataatatatgatatatcatatattatatattatataatatatgatatatcatatattatatattatatataatatataatatatgatatattatatatgatatatgatatatcatatataatataatatatcatatatgatatatcatatattatatgttatatataatatatgatatatcatatattatattatatatcatatattatatgttatatataatatatgatatatcatatattatattatatgatatatcatatattatacataatttatattatatgttatatataatatattatatatagtattatattatatattatatattatatatcatatattatatatattatatataatatttattatatataaatattatatttatttatatttatatatattatatataaaaataatatatattatatattatatatattatattatatattatatattatatataatatatattatattatatgtaatatgtattatattatatataatagtatatattatatataatgtatatattatatataatagtatatattatattatattatatataatagtatatataatatataatatattatatagtatatatgttatataatatattatatagtatatataatataattaatatatattatattatatattatatagtatatattatatatactatataatatataattttatatatatagtaggtgaccacattgctttttaagtgcatatttcttgttttttgttttgttttgttttgtttttttgagacggagtctccactctgtcacccaggctggaatgcaatggcgggatctcagctcactgcaagctctgcctcccaggttcacgccattctcctgcctcagcctcccaagtagctggaactacaggcacccgccaccatgcccagctaattttttgtatttttagtagagacggggtttcattgtgttagccagtatggtctcgatctcctgacctcctgatcctcctgcctcggcctcccaaagtgctggggttacaggcatgagcaaccatgcccggcccctatttcttgtttttatccatcttggtgatgtttggctggagtaaagggacaaacacctggcctccaaacaggagactctattaattttgaataattttacaaactcttcctcttacctaggattctcatgtcacctctatcctcaggcttattaaaaaatcattcctctagggcaccaatattaatgatgaagttcatattttttctaaggtacactagcgtggaaaaaatgctaaaactactaaattacctgataaataacttgaaaccagtgatctagtggtatggcatataaatttgaaagtagtgaataaattgaagactttgaaaatacattatagatgccaaaataacattttaaaattaaaaattcacaatattgagtacaatttctataaaataaactttatttatgttaatacagtttgaacacaacacaatcaaggtatagatcatttctttatatttttttttcttttttgatacagagtcttgctctgtctcccaggctggagtgcagtggcatgatctcggctcactgcaacctccgccacccaggttccagtgatcctcctgactcagcctcccgagtagctgggattacaggcgcctgccaccacccctggctaattgttatatttttagtagagacagggtttcagcatcttggccaggctggtgttgaactcctgacctgactctacctgtctcagcctcccaaagtcttgggattacaggcgtaagccaccacgcccggccagtatagagcatttctaatacctccagactttgtgtctgctcctttgcagcccatctcctgacatcctcctgctgaaagaaaccactgatctgctttctacttgtccttatagatgaatttttgctatttctagaatttaatataaatgtaatcatgtcatatgtgctcttttatgtctagattcattttctcagaataatgtttttaaggttcacttgtgaagctatgtgtattcttttattgctatttttctagtgcatatatataccaatatttgtttattcattcacctgttgatggacattcattttcaatttgggattattatgaataaatgtgctataaatattcctgttctttgggtttataaatgttcatttttgttggttaataggaatgcatttgatggattgtttttaaatatatgtttaaactcatgagaaactacaaaagagtttgctaacgtggttgcaatatattacattctgatcagtgatgacagttccaaatgatccacatcctcaccaacacctggtattatcagtcttttaattttagctgctctagagaatatgtggtggtatctcatgatggttctaatttccattagtgtcatgaccaatgttttaagcatgaaaacatttaaacattccacaggcttattcccagtttgtaagttttatttggtgaagttctagttgaaaggtcttgtccatgttttcatcagaatgtcttaactgggttttaagagattcttgtatcttctgggcacaaatcttttgtcaaatatgtgaagtgacaactgtggttctcttttactttcttcaaagttccttacaaaaatttaaggtttttatttcaaagaagttaaattcatcattttttcatatattgtttattcttttatgtatcatgtaagaattttttgtctacaccaagtggcaaagatttgttctggtactttcttctagaagatttagttttggcttttctttttaagtatatagctctagtacaaattgaaatagaatatatcagtaagagcagacatccttgccttgttctcaatcttagaggataagcatttagtttttcactggtatcctcttccctgtagaaattttgtaaatgccctctatcagtttgagaaagattccttctttctttgctaagaatttttttattatgattatgtgctaaatattctcaaatgcttttgctacattagttggtttagatatgtgtcctctccaaatgtcatgttgaaatgtgatctccagtgctggaggtgggcctgaagataggtgtttgggtcgtgggagcggattcctcatgaagagctctttccatgagtaatatgttccccttaaagagcctggcagctcctccctccagctcttgctccccctttgccttctgccatgattgtaagcttcttgaagcctcatgagaagcagatactggtgccatgcttcttgtacagcttgcagaaccatgagacaattaaacctctttgtaaattacccagccacaggtttttctttatggcaacacaaagtggactaacacgctacttctattgatatcatcatatagctttcctccttatactgctaaaatggaaatttacattgattaattttcaaatgcaaaccaaccttgcattcctgggataaaccctacttgctcgttaggtgtcattctttttctgtgttactagatgtgctttataaatatttgaatacacatgtttgtgtctaggtttataagggatatcagtgtgcaattttcttatgaagtttttattttaatttttgtattacagcaatactggccagataaggtaaattgagaaatcttctatcatccactaatttcttcaatattttgtataggatttactttaccccttccataagggcttgatagattacattagtgattccacctgggtctagagataggcgggagcattaactacaaattcaatttctttaattaacattgggaaatctaaattttctatttatgcttgagcctattttggtaatttgtatttgtcatggaatttgtccatttcaactaaattttaaaatatagtggcagaaatttgtttataatagtctctttttaccccttagtgtctacagtatacatacacataactcttacacttccaatattggtattttgtattttctctcttgttataatgcttttatctactaaaaaagaaaatccacagtgtatgaaaggtggtgttggattatgccaaataataaaatgaaaattaggactattttgtagttatttcaatgtggaatcttttacttgaattccagtattgaaccacctcagaaccaaagtattgcatgtttttaagtaaaactgaatatgctttacacagtttagtgagagaccattttaaacaccgttcagatttcttggtaaccctacagaaaataaattgagtatatatatattttttccctcaaatgttattttaagttcagggatacgtgtgcagaatatgcaggtttatttcacaggtaaacatgtgccatggtggtttgttgcacctatcaacctataacctagatattaagcccattatccattagctattcttcctgatgttctccctccctgcttgcccccgcccccaacaggcccagtgtgtgttgttctcctccatgtgtccatgtgttctcatcattcagctcctacttgtaagtgaaacatacagtgtttgattttctgttcttgtgttactttgcagaggataatggcttccaactatccatgtccctgaaaaggacataatctcatccctttttaatagctgcatagtattccatggcatatatgtaccacattttctttatccagtctatcattgggcatttaggctgattatgtatctttgctattgtgaatagtgctgcgatgaacatacacatgcatgtatctttataatattaatataatggtttttattcctttgggcatatagccagtaatgagattgctgggtcaaatagtatttctgcctctaggtctttgaggaatcaccacactgtcttccacaacggttgaactgatttacactcccagagtgtaaaaatgttcctttttgtccacaacctcaccaacatctgtggtttcttgactttttagtaatcacccttctgactggggtgaaacaatatctcactgtggttttgatttgtatttctctaataatcagtgatgttaagcttctttccatgtgtttgttggctgcacgtctgtcttcttttgagaagtgtctgttcatatttttcccactttttaatggggttgtttgtttcctgtaaatttgcttaagttcttcttagactcactctggttattagacctttgtcccatggatagattgcaaaaactttctcccattctataggctgtctgttcactctgatgatagtttcttttgctgtgcagaggctctttagtttaattagattccatttgtcaatttttgcttttgttgcagttgcttttggagttttcatcatgaaatatttgcctgtgcctatgtcctcaatggtattgcctagattttcttctaggttttttatagttttgggttttacatttaagtctttaattcatcttgagttaatttttgtatatggcataaggaaggtatacagtttcagttttctgcatataactagacacttctcccagcaccatttattaaatagagaatcttttccccattgcttatttttgtcaggtttgtcaaagatcagatggttgtagctatgtggtcttatttctgagttttctattctgttccattggtctgtgtgtctgttcttgtaccagtaccatgctgttttgattactgtagccttgtattatagtttgcagttgggtagtgtgatgcgtccagctttgttctttttgcttaggattgacttggctattcaggctctttttttggttccatatgaattttaaaatagttttttttctaattctgtgaagaacattaatgggagtttaatggggatagcattgaatctataaattactttgaacaatatggccattttcatgatattgattcttcctatccatgaacatggaatgttcttccatgtgtttgtgtcatctctgatttctttgagcagtggtttgtagctctccttgaagaggtccttcaattcccttgttagctgtatccctaggtattttattccttttgtagcaattgtgaattggaagtcattcatgatttggctcttggcttgcctgtttgttgttgtataggaagagcatatatatatttttaattccactttacatttgtaaaataaaatgcaaaatatttttatgtctgttttcatagcacatttagtatgcatgtatttctctttaagtgtttgactttcaatatttaaaataatattgcttgttatttgaagaaagttctaagactacttaattaatttacataagctgtttggcaatagtataaccagggacttctgctaaaagagactgttgcaatgataaaataaaataaagtgcatattttctttaaggagtaatgtttcagtaattccacaagaaaactaaagacccccaattaaatgtttttaagtttaacttttacatattttcataatgagatcaaaagaggagttggagtttagggtcagaaaaagaaaatcattctatgttcaaatgtctacaatgtgcatatgctatgtcatgcaggggtgagatcaaatcaacaattttcaagttcatcatctcatgtaatgcatacatatacatgtgaatcagacttgttatgctgttattattaaatgacatggaaaagaaaatattaaaagactttctgcaattatctcatttctcttgcaaatttggtaacatataataaatatatgtactttttcctccacaggacctgattggggatatgagggagcagctttcggatcacttcaaagatgtgatggctggcctcatgtacccaccaccactgtatgatgctcatgagctctggcatgccatgaaggtagtgatctgatccaaaaatatgcctgtaacaagtacaggccagtatttcagtagaggggaaactgccctgtgatgctcctacatacttatatgatcaaggagaggggagggaatatctaaacaatgatgtaacaatggaaatgttgtggtcaagggcagtggccttgttaggaaggtggagcctcctgggctgagtggctgggatcagcctgttcttttgttgtacaaagtcacaaacttactgagccagccccagtgctgacctacaacaaggaaaagtgaacaagcctccagggctattcagatttgtccctgagcatgtattcctatattgaggataatgtattaaaaatgatgtgaatcttgttacattatttgtaaaaatttgattaagtcaaaagaagatattgaatcagggacaatatatagatgatgtctttatattttctttttatgacctgaagttcattctttacagaaacatttttttttttgctcaaatgtataaaaatcttaatttggaagaattagaatcagtgtttcttacaggaaagtcatttccatgaaataagttgactgtggatttgttacagattttgttggctaggtacagggaacaaagagggccttggctttacttctttccaaatgcagatattaaacacctgcagaactgttgaaatcattccagtacgatgcttgccaatgaccagattaccacaatctgtgaacaatgtgtgacagaaaagaggcaacaggaaaaaaattaaaggacatggattttggccatcacatttactgatccaaataggcattgtacaaaaattatatgaattttaactaatcgcttttaacacatgttacatgtcaattcctacctcttgcaaaattatgtctaaaaattatttaaaaaataaagttatatgtttatatgttgctgttttgattaaacaagtgtgttttatcaataattcatagaatgctaaggatttctgaggctttcctaaaaaaggtgtattgtctttaagatctctttcacagaccaatatatccatgtgtctgcaagagaccacagaaagcatccatccaaatatttatgcaaattgtacaaaattccacatctagagaggcaggcacaggtccctaaaatattctcggcaaattagaaaacctgtattctaatgtcagcttgctaaagaattaatattccagcagcaaatggaatatcaaatatcattccaacagcaaatggaaatgctcaatgccatgagcattgcttgaacatgtctttctccacattgtttagaaatgctcatactgttttattctaaatgaagaaacagtttccttcagataatattaattcttcagggtcaaataggtagtaaatggcaaagctgaaactaagattgtgcctgccttcatcctaaaccacttcctttccctgccacctctcaaaacactggaaatgctgtatccctttcttgtacaaaaggtacactattacttccaataaaaatatccttacatttatctcttttttcctttctctagggagtaggcactgatgagaattgcctcattgaaatactagcttcaagaacaaatggagaaattttccagatgcgagaagcctactgcttgcgtaaggaaatatacatatgtgaatatattttacacatataagaactttataacacattaaatattccagtttatgtattttgaagaattatctaagacattcttacatttaacataggattcactgaggaccaattaactcattaggtaaaaccgattattagtgcactaaaaatgaaaccattctctagacaatcaagttaagcaaattttccaggaaaataattacaagtctctatgaggtgaatgttttcattaagacaggaaagtgtcccacattttaattcagggggcatttcacctcttacccaggaaagacccagcatatagaaaaaataaggtacaataatggctcagtgaattctacaaatatatctgcttcgctttacataaatttcacattcccgtaatctactacaaaatcagatttttatacatttcaaaagtagaaagggtaactattttcactttcaaaaaggtataatgccttaagttctattgcgttatgtagtatatgacattgtgtgtcaagaaaatgttgcggacagtcatctctattgcattcaaacaaaaacaagacttttctgaagggaatgaagtcagaactttcactaaaatgttaaaatgagatgaagcacttagaaaaagtattgggctgggcagcattctgtggaaatagaatgcataattctgaattttgagaatcagagaatgtgaaatgactctcaatcctgtttttcaattttggactaaagatttttaaaaaatagtcctgtgcttatgttaccattaggtgacagaattctttggcagacggtttattgacaaagaaatgtcaacaggtggactacatttcctggactttgtactcacaactgggaaataacattaacttactcaaaacacactgatacatagttctataataaatcatacctttaacatgttttcttatacagaatacagcaataacctccaagaggacatttattcagagacctcaggacacttcagagatactctcatgaacttggtccaggtatggcattccaaaatttacattactttgcactatctaagcaaataagtatatgtcattgccaaaaaaaaaaaaaaaaatagaacagaaaactccagtatattacagttcaatagtaaattctgtgtagtaacatttactgaagccatgttcaaaatactcaactagaaatttaagttgttaaagacaaatatggataatgcctcaactctattttcaaaaaattaaaaatctattctaaagagattataaatatacatgtatgtataattaattttatattctgagaaaattaaaagattaaaaatattacagttaaaattaataattctaattagaaataatttctttctttctttctttcttttttgagacagtctcgctctatcacccaggctggagtgcagtggcatgatctcagctcactgcaacctcctcctcctgggttcaagtgattttcctgcctcagcctcccatgtagctgggactcaaggcacgtgccaccacatccagctaatttttgtatttttagtagagatggggtttcaccatgttggcaaggctggtctcaaactcctgacttcaggtgatccgcctgcctcagcctcccaaggtgctagaattacaggcgtgagccaccatgcccagccttagaaataatttcatttttaaaactgctacatgggcttagcgcacactaacatttctgagctcctacaatgtgcctagtactgtgtgaggagagaaacaattttctcatttaataacaacaaaacactataatacaaatattctcataagtacttcagaaaagaatagagaatcacaaagtataaagttctagctctatgattgtctgaagagctaataagtagaaatccagaatttgattgaatgctagagactctaaatgccagcatatgatctttgatgcagcctataaaaattctgtggtgttatatattaccaaaaaggaacactacttcaagttaaaaatagattttatcatttatgtttctgtactggctaaatgatatataagtatttccatttaatgaatatttcttgaaaatattccacatattagcattgtaatacaaataatatttttaaagatataattatctcctgttttatacatattctccaatgtgcctgttatcctatttaacaaaggcactcaggaatgcaaagagaaagagggtcagtgttcagctcttaatttctaaaagagaatctcaaaggccacagctgagaaacatgtcttaaaagccagaattttggtttggtttggttttgtgtttcgtgtgtgtgtgtgtgtgtgtgtgtgtgtgtgtgtgtgtgtgtgtgtgtgtttgaaatgaagcaagagtttctaaacctccaaacctttcctttacacatcaaaggcatagtagttagcaaagaattagtagtcaccaaagaatttcactaaaaccaagaagttgatagaattttgtacatgggaacatgacattagaaaagatttcaatgccttttaaaaaaagaatacatgaaagcctttttagtgggaacaaagctggaagagtaggacctaggagagagaaggatctatagtccaggtggaggggactagagtgagaatcctgcctaaggccctcaggaacacagagccccacactcttaggtgaggagttagaatcaccagataaaaacgcaaggtagataattgtctattctttcatccttttctctgaacccctccagtcccaattgcttccatgagttattggatttgtttttaatctaaacgtttctgtggctactgtggataaactctgagaagtcctcccctgtcctttatcctgcttggctttatctgaagaggtgctatggagaacagacagtcctcagtccctgaatttttatggtctgacttatctacttcatggtacctttctactttatgatggtgcaaaactgctgcaattttcacataatagttgatattccataaattatgtgagatatgtaacacactttattgtaaaataggctttgtgttagataattttgcccaactgtaggctactgcaagtgttctgagcacatttaaggtatgtgttcaataggttaggtgtattaaatgcatttttgacttgggatattttaatttacaatggatttatcaggacgtaaccccatcataagttgagaagcctctctatatccttgtaccactttcatagcagctcaactttggcaaatttagagtcctcatattttgtttatagcacacgttatcaatatttctttaatcttagtttgtaatgtctttgaaaatgaggatctctaaaaacttagaagagttgtgatctacttgcttttggttaggtccatttaccacttaaccgcatgcaaagttctttcctagatatatttctccggtatgactttctttgcatccttgctccctcatttatgccttttttattttcacgactcaaaaacatttccttgaaggatctcttagaaggtaaaactggccgggtattactagagggctgagtcataacaaacccttacttttcaaagcctcttcaagtctcagcttacattgcttggaatcagtaagtggtttctctttgtaactcttcaaggcaccaaatttctaaactttctctcttctcccttgtatgtctgcttgcaaactagcaagttatttactgagcttatctctttcttgtaatagatgactaaaagcataaagtaaatgccatttctcaagctcacaggaagacctgaacaggtgctaccgatcagagtgcatttcccttccaagaagtgatccagagacttagtctccttccaccgttacaactggcttttaagtttatcatgtctgtcttcaacccagggaagcagaaagagaatagaggtttcttcacagaagtgttcatgagccttgttgcaatgcatatccatttctgctcagatatcactggctaaaccctcactcaaggaggcctacttaatatcaaaggtagtgaagttatttgtcttcaaggaagttgaaacaagttttaaatctgtatttagtgtatttcttcttcttcttcttcttttttttaacggagtttcactcttgtcacccaggctggagtgcaatggtgcaatcttggctcactgcaacctctgcctccctggttcaagtgattctcctacctcagcctcccgagtagctgggattacaggcacgtgccaccaagcccagctaatattttttatttttagtagagacgcggtttcaccatgttggccaggatggtctcaatctcttgacctcttgatccgcccgcctcggcctcccaaagtgctgggattacaggcgtgagccaccgcgcctggccaatcagtgtatttcaaagctgtgaaaaagaattgaacattgcaaccaagaaatacaaatgggtaacagaagatggtaaagacatgtttgtcaataaatagaaaacttatgatgatgactatattaggcccaaatagaatttctaaaagggaagcatatataaacaaagaatttgctttgttgtgtttggttttggtttggtttagtttaatttggatatctgtggtttggctacatagttcataaaactcccatgtcaccactctcagtaaatcatcctattctgaggattttcatctgtaggattatccatgtcagtggagaaaagataatttggtttttcatagtacaaactgaagcgtctggtaaaatgtaggtataagctcattttaatttgtaacagaagttgaggtcatttgcagaaaaatacattttcaataataattactattttaaaataatctcgattgacaagatgccaattgaatattttcttttacattttataagattaattttaattaaaattttttctcaatttaaaaggtaattttacaataatgttgctacaataatataaattaaagcaacagtttccactcagagattcttcttggcacaggtattgcccctaacagagtgaagccaacagttccattataagccattataaatcctaatatcaaacaagtttttattgctttagtaggaagaaaattattttcctaaggactttatttaattccattaggactgcatcacagccaaatcctgcttctgttccctccctcccataggtgttgatcccaagaacattccataattaacaggctggatgccgatctccgtctcaaagtcatcttcccaggaaacccaactggcaatatcccctctgtgtagagatgaggagacttaagcttagagaggttaagtggtgtacctgacattacaggtctacttaatgaaagggctgacatgaagtcaggcctagatgcactatacctctgctgttgaattgtactgctcctatctccaaccccatttggttccactccaattctacttctatttggtaaaatgtcaacgatcaaaactcaaatcctcttagcatttctgcacctctttaaaggttgagctataaaccacctaaaataactgacatctaagaattaggatcacagtgtatttttataaagtaagcattcttgtatttcaagggaaaacacaagttccgaaaatgaaacatgagggaaaataaatcacaagtgaaaaaataatcaatgaatggtgacttttggatgtaatagggcaatcaattttattcccaattgtagttatttttttcctaaaattaaacaatgatgctttattaatgatagggtgtgtacatgagtacgagtatttgtatatataatatcgtttgtgtagatatacatatattttaaaataacacacaatattttatcactggtttttacctaatttagattatgaatgaacaggatgaactattacttttttttaaagataacatcaacttgaatttttaatttgattttccttcttatatatgtcattaaaattttcaaaaaatgtagcacctataaatttctagaattacatgtaggaatagttcagatttttattgcttccacacacaactttatttcctagttttatcttaacagaaaaagctaatcctgtatactgcagacaggacagaatcaacattctattgcttgtgttttaagtttagagttttaggcttttggctcctaataggcataaaggtcttctccaaaccatgattcaggacccaagactcttttccgtttgtggttccaccaaaagtgttacttcttaagtttgatttctagaattggaacattaaatatatgtatgagtatttaaccttggaacagcacttaagtatagtaaaattttcctttcaacatagaataccaaaaagtgtgggtgaatcaaggcttacattttataagaagccaaggaaaattaataaagtttactttaacattatatacttacaaagtttcacagtacattttccttaaaatataaaatacacaaaaatacaataatacatatttcataaagattatttaactcataatagaaaatggaggtaccaaactattaaaaacttaatataatctcctttaataatagtctcttcgaaaatcagaagttccgtgataatttatactgttagtaaaatgtatgagttctcttagattgttaaatagttcaaagattttctattggcttctcacttctacattaatggcttctcagtttggaaccactgacttaggatttggatcagtaaattcagaaaattggaaaagatataaagtgaataatgggattgtaaaagtccatcacttctcttgatcattgtctgtggtgtacacaatttcagagagaatctgtcaagatattttacaaaaagaaatggagttttcttctaaagggaggtgaaatttggagctggtgagttcctagtgggtaactgtggggcaccatagtgtaatcaaatctctcccatcagttttgtatctttggatttatcatttaacctttatgagattcaggtttttactctgtaaattaaaggatatgagctcatccttctttcaattcctttccaaaacaaatattctccaattctttggttgttataatcaggtcctctacctccctatgcatcttcacttttagaatcaaaggaaagatgacccatggttttcatatttttaacatcactaaaattcagacacacccattttttttgaattaatagagactggggtaattggagcataggagccttaggttcttgtgaaatggcaagtgttaaaaatcattgtcatattttccagaagacaagatcatttactttatctataaagtgtttcctgacaggatgatttctaataaggaaacaactgagctggaacacattcttcttgaaaactaatgccaattattaaactggctcacaatgcttcctgcatgcttttattacacagatttatgaaagatctaattatctgtcaaataatgaaaaattagtcacttagagattaattaatcaatatgtgcaaatcacactggagatgataaacgttttcaggaagagaaagaatggaaactacctaatggatacttactgcttaccttggctttcagaattctcttatgacagtttcttgaacccgtacaatgaggcctctgggagtgttatggccaacagctttcaataatcatctgtaatcaattcatcgcctccaaatattttcacccacatcttagttcttttcatttctttccttcccatgtttatcatgcccttaaactaaattctgtactcatttatgccattttctggtacttacatcaattaaacataccatgtggccgtctcaggccctttacatgacaaagccagcttgactctgcctttgtcaaagccaaatcacaatcttacttattcacattgtttaaatccaccagtgtgcttaaagtgctcttggtaattagctgcataggaaaataaacagataggcaccatttcaggttaaatgtccaaaacaattatctttccaaacaatatttcagatatgtaaagttgcagaaaattcttaaatatctctcacaaactttgcaaaggcaggagcttacttagctatagaagctgaagatcactaagaaaatatcaataatccagaaaatcttcccacatccactgatgcatctttgaagtctgctatctaaagttatttctttacttttccaattaacatttcttgaatgcctaccatgtgccaagcatgattttagataattgggaattattggtgtacagaagagataaagatcccagccagcccttaagatgcttacattctagcaagagaatatggacaattaaacataaatttaataaataggtggattatataaaatattagaaggttgatgaaagatatggcagaacagagtaacagggagaagcattgtagggctgagcataatgggtatgttgccattttttttttttttttttttgagacagagttttgctcttgtcacccaggctggagtgcaatggcacaatctcggctcactgcaacctccacctcctgggttcaagcgattctcctgcctcagcctcccaagtagctaggattacagatgcctgtcaccacgcctggctaatttttgtatttttagtagagacggggcttcaccatattggccaggcttgtcttgaactcctgacctgaggaggtccacctgcctcagcctcccaaagtgttgggattacaggcatgagccactgtgcccctcctgccatattatatagattggtcagagtaggcctcattgagaagatgagatttgagcaaaaatatggataaaagaatgagttaacaaataaatcaatgtgataggatgttccaagtaaagggtatagctagagaaaaatgtaaggtaagaaaagctaatgggtatgagggatagacacaaggccagttggtagcctctgagcaagcaaaggaaatgtactataatagtaaatgaattcagagaagtagcacgtggtaagattatgtcaaatcctgaagccattttaaggactttggcttttcctttgagtgaaatggatgagaggtaagtcattgctgggtctttagtgaaggaacgtggttttatgctttaaaatattcacaatagctgctatattgagaaaagactacagggagccaaaggtagaaacagaagcctgtaaggaggctgcttcagcagtaaagctagctgtaatgttacctcggacccataggagagcattggcagtggtgataagtgcccagtttctggatgtattttagatagcagcaggagacagacaaatctttaggcagacagggatggtaaaacccaaccttcacaccaaagacagtttaaagctgaaaacccatctacaagtctcagataaatccacagaccggattgggaacccctcttcccatgtgaggtgctttcctctggttgatccccagccttcacctattttacacattcctacccttccctaattggttttttacactgttgcgcccatctttgagtggtgccttttttttagcctttttgcgtcctaacaaaccaatcagcacatacccccccattctgagcccataaaaacgctggactcagtcagagcaggggattgcccaccttcgggtggtgggggaggaactacctgactttgggtaagggggctgcccaacttgggtctccctctttgctgagagctgtttcttcactcactaaaacccttcaccttgctcacccactgactgtcagtgtaacctcattctccttggatgtgggacaaaaacttgggacctgccaaacagtgagtgtgaatagagctgtagccctgtagcactcccttcccactcaccaagcaacaggaaaagtagctgcttggctccacatgccccctttagtcaggctgtcgatggtggaactaaaagagctgttaacacacccctattcacctggagtctccaagttttcaggcaccaccatgtcccctttgtctggacattggagtcacttgtgacatgcctggtccagccacaagccccacatggagcccgcacctatgccagcaattggaacagccagctggaccccatgctcactcgctcacacatcccctcactctgcgggctgagtgcgcagtcacagtggccacaggatccaggccaggtggcaaggcaaatgcagcccaacaggctgaatgggcagggtacctcctgccacaagcccagggcgagcaaggcccaggcaggagcattgccagccacagaggtctccaactggcaaaacgcacagaaaaaaaatcctgtgtcattttgaaggcagtgtctatattatttcctgaggaactggatgtgggctatgaaaaggccgaagaaaaacggaatcaaatgtgactctcagtttcttagtctgagcaacagaaaggatgaagtgcagtgtggaagactgagactatagaaagagtttgaggtggagggagtcgaggcattgaattttcaacatgctaaacctgatatgtatattagaaaatcaagtggagatgctgaattggcaattggaatatacatatctgaagttcagatgacagatctttgctagagatgtaaataaataaatgggtaagacaaatgggtatcattacaatatagatggaatttaaagccacatgagtagataacattatcaagagaagaaatgtaaatacagacaaaaagatgatcaaagactgactacttggaccttccaaaattaagagatcgaaaagaagagaaaccagttcacaagactgaggagtaaccaataaaatgaaatagattgcaggatcctggaagccaagtgatgaaagtatagcaagaagaagagagtgtcgattataccaaatcctactgatcgattcaataagatgaagactaagaattaccacaaatgtatgttattaaataaatggcatgtagtcacagaagatatagcatattaattgcttccaattatttgtttcttggtattaattaaaatcataagagagaatttgaaagggagccagaacatattgtgtaaaaataagttatttaggctaagggaagagtatggtaaccagacctcagagtcagaaatgccactgatatttcatacacattcttctctaacaatcagaccttgggcaattcacttaatatctctaatttttatctccaaaatatgaggtgggactcctaaggtacctgcacctcaacatttccatgatttgaagataacacccatagtcctaccactcaataacattattcactcctttattttaatacacagatttcaaaataagaattgcatatgtgcagtcttagtctcttggtattttaagcaaaggaaattgagcaagaagaaatgtgactgacaaactcatgcctatttcccatcagttgttcacctttaggggacatacaacttttgagttatgattaaacattaaatgttccagggctacacatttatgcaaaaatggtagcttacttatttctttgtgaataaattgcactttctcatatgcctctagctttttgttatcaagaaaaacagccctaatatttaatctaaaatggcaaatttcatctgtgtgatactttgaatagtgaatgtgggtgcacgttcaatgtcatcatacttttattgggttaagtatttgactctcagatttctggccatcctcctcctttctttccaagaaggcaattggtagagagatgtgtgtgtgtgtggttaatgaactaccttggcaacaggaaggtcaccactgtgtccttagatcaagatattgcctgcattttggctgatcttgactatggaatagcaattcttggcaattctggacattgaatatatgaggtgtcaatgaccagcatatgggcatttatcagtgttagctgccaagataagccactgatttaatttatgatcttttctctgtcttacttaggtcagagccaaactgaccagtttggtcagagaaacctttcatgatgatttagcctcacctttactctcacgggagctgaagactcccccaaaggtctagctgtgtctcccacatagttcaaatcaatgtggtctatcctgtagcccttggctgctggaacactgtccctgccatggtcataaacaactcaatctggcaagcttccccacaggttctcagctagattgcaagttcctccatcaggaaccggtaagaaatttgggatcccattcatactatttagggactgaggtttattcaaggaagttgtgtttaagacctctctgtgccctcttgctgtctcactggattcactgcactgtggctattcccagtatcctaaaagatgacaggactaggcacagtggctcatgcctgtaaccccaacattttgagaggctgagacggaagaatcacttgaggccaggagttcaagaccagccttgtcaacatggcgagatcctctttttgagaaaaaaaaaaaattagccacgcatagtggcacacgcctgcagtccaagctactcgggaggctgaggcaggaggattgcttgagtccaggaggtcaaggttacagtgaactatgatcatgccactgcattctaacctgtggaatggagcaaggccctgtctcaaaaaaagaaaaatggtagaagcagaagctactgtactttcagtgttctcttaacatagttggagcaaggagaaagcctcccctccatatcttgacccaaaagaaacagttaattagactgataacatgcctccctacctccttctccccactggccctcataaccctcaggaatcaatggaccctgcattggttagcgccccttccctcctgtttgaaatgatcaactggaccatgtctgttctctaaatgataatggagtgagagttaaacagatttacaaaatattctcactgcacaaagtctgagcttcattactattttgttgttgtataaatcctattgtgcaagtcagagatggactttctctgcatttttgctctaacaatgttaacactcatttctaacacccactgccatggtcaggcagtggatactcagtttgataagggagaagatactgcacagagacttggaaaactgaaaaatgcctaaatgtctttcaaacattaccagtgctgcaaagaaaaggtaaaataaaataatgcacattttaagacaaaaccttatacactatcttctaaagtattcatgaaatcaggaaatgaacacttactccagataataaaagaagttccttaggaacaatcagaatgtttttcaaggatttcagtctcactaatccaatatgagttgctgactaagaacatttacatggaaaacctgtgcttactttacaggggaccagagaggaaggatatacagaccctgcgatggctgctcaggatgcaatggtaactagaaccagttctcagactgactgcaaagaacctgggttaaaatgggctggagtggttctgatgctacttctctgctggctaatgttccaggtcctatgggaagcctgtcagcagaagacgggggagcacaaaaccatgctgcaaatgatcctgtgcaacaagagctaccagcagctgcggctgggtaattattaactgggtttcgttccagctacttgaccaattatataacaaaaagaaggtggttaactagaaacaaaaatgaaatattacaaggaaatagcggaaagtcagttatctcaaaggtacttattttgaattttgtttataagatgtgccttatttaatgacattactaaggaataaatatttccttaatattttttccaataactttcaaaaactgagcattttaaaaataatctctgtatttgatggagtacttattcaaatatattagctgtttcctattaggtatattatatgttgtcttgcaaaatgcatagtaaatatagtttaaccagtcaatactgcatcaaggccattagtattgatgtcatgatttctgcaatatcgacggaatcttattggtcttagagggtgcactcatgttagtttgccctttgtttgacattccctaaactacagtgtctttttcttttattaaaaaaaattttgtttttttctatataaagtacgcaaatggctgaaaattttcaacagatggcctaccctaccccaatcccacatctagactttacaagtcaataagagacattacctgtcttaatgataatcataataataataatgaaaagacatcttcttgcttctaattttcagtaagaatggatgagaactaaagttgcctggggtagtcagataactaagttcgtgaaataaagaatcttaatttaacacaattctaaattagtaaaccctagtctacacccaaaaagttgatttcatatttctcagaatattctttatagatactttgctattttaatcatcacagagaggacttttacacttaattctcatatttaagctctagtaggaagtttgctgctgacataagcctattatatatgtcctaaataactggtccataaataatggcttgttgtgtgcttcctctcaatttaaatcagcagtgagttagtgggtcccactggaggtggcatttgttccccaggagaagagaataataacaggtctttgaagttcaagatttatgctgactctactaagagtatttgtatttgtttcaatggtatttatagcaaacagaattgataacagtagtacttttaattattttatggaaaatatggatttttactatgtgtaacaatctaatatttgtattataatattttcaaaatctcctttgaattacatcaatttgttaaagttttccaggaatttcaaaatatttctgggcaagatatggtagatgccattaatgaatgttatgatggatactttcaggagctgctggttgcaattggtaagtaataaattatttgaagcacaacagacattttatttctctataaatgctgagtggctctgattgaactaaagatgcatgagtaagctcttgatcgagtcattttcccttgaatttaattttttaaaaggacattaactccataggggaagagtacatcagctactgataaaatgcactaaactggcaacctgataactttaatgaactgatacccttccctaacagctagttcaactttcataccagaaaacacatcattctcagatattttctctttgaattggcttctcacactgttcaatccattttatctttactgacttccattcccttgtccaagagccgataaatacttaacagtatggttttcttctctttaggaggaaaaggatattttagtgaccattactaataaattttggtttaggagtaaatcctaccataaaagagatttaccaagtagtgattttcctcaggctattgtgatagtggcacacctcttgctccttcctaagtaagaaatgatatccctccatagaggacaaaacggggcgagttatccagaaaaactgcaatagaactacctgtgcaatagaactacctttgtcttgtactgtgctggtgaattgacagcacacatttcagggacgaccaaaggggatcattatgaaatatctccatcgaaggcgtagtcaagtaatcacttagatactagttgaataaatgaatattgtgattttccatccttgaatggcagaggcatacacgggcgtgagagctgacagataaaggaatttttgtagcttatctagtaaagaagtctcaagctaggcttccatgaaaacagtttgatgaaacccctaaaatagtatgcaatagatgactattaataactgtgtattttttctgaaaatgttacatttattccagaaaattctctacaaaatttaataaccatatattacatcaaaatccttcattttataaacaatgcctaaggaaactaagtaactgcctccaagcctatcagctgattagcagcaaagttatgactaaaattcataatatccgaatctcaagatagctttctttccactatagacccctgccacaaagcagtgggcataagagaggaagtggtggacattagaaatggcagaaaacatttcaactgatttattcactcagcagacatttattcagcacctactgttctagacactgacttaggcactgcagatagaacaatgaaacaacaaaaacagcaaaagttcactgccttcaaggagcttttaaggagtagtgactcaagagtgattatgaagatttcgtgtattaaaaatgaaagaaaagatgagggtataatctcacaatctaaaataattacttaaactaccagggaaatactgttatgattatttcattctggctagaaattatagcctctcatacattacctattcatgtattaatttgttaacctcttcaaataaacactactgaatgtttatgatcatcaactgacttccagcaaggtaactgttgaccaggctctaggctgtcctaccaccttagcagtttttattagataacttctagaactagtctagaccagttgtggtccatagtttccccttaagagatttcaggtctactcacaaatctataagttactaaaaatagcattcaaatagatgaacagattacatgggagctatatcaaattcaatcctacaataataataataatctataatagtgttaataacctaggtctctttgaagctctattaatttaatattcagataaagatgataaagttttcactttgggaggcagaggcgggcggatcatgaggtcaggagatcgagaccatcctggctaacacagtgaaaccccgtctctactaaaaatacaaaaagttagccgggcgtggtggcgggcgcctgtagtcccagctactcgggaggctgaggcaggagaatggcgtgaacccgggaggcggagcttgcagtgagccgagattacgccactggactccagcctgggcgacagaacgagactccgtctcaaaaaaaaaaaaaaaaagaagatgataaagttttcttcattaggctacatgaaggaactaacaagagttccaacagatagaaatagaccaagtgaaaatctgcatgactcattataatgttgttgctttatatttttttcctgtggcttatagtgttaccattattctaagtgttgaccttacaatacaatgtaagaattgtaacaggaaaagtgttattgtttctcaaattctgacgaaaatatatgttttcactctcaatgtttcttcttctctctctgatttctcctagttctctgtgttcgagacaaaccagcctattttgcttatagattatatagtgcaattcatgtaagtaagacatatatttttaaaatttctccagaaattgtgtctgttttctcaaaggattaattttacttccatcatttaaatgttcattaccatttttgaacttgtatgtacaaagaaaatacacccaagtgagaaaaactggtttagacaccaaaaataagacatatcagataaaaataatgttctgctttctgtatcaaatttagggaaccatatttggggtgtatctccctgtgcactttagagattatttaatatctgcagaaactggtaaattcaaatgtttttgtatgtttccaaagacccccacatcagacttatgcaagtacaaaacatatggcattaagcagaaaatgtcaaaatattacaaactctcagcaagcaattgccacgttcgtgaagtttcaatacacgaaattatgtcaatggatatttttgaacattgtgctattttcaaaaagtatttaaagtgataactagaaaaccataaactctaaatctatttttgtaattaaatgggaatgtttttcatacttcagtgtgttattcagtcgcacatactttggagcattaattttttttttttttttttttttttttttttgagatggagtcttgctctgctgcccaggctggagtgcagtggcgcgatctcggctcactgcaagctctgcctcccgggttcacgccattctcctgcctcagcctcccaagtagctgggactacaggtacccgccaccacacccggctaattttgttttgtgtttttagtagagacggggtttcactgtgttacccaggatggtctcgatttcctgacttcgtgatccgcccgcctcggcctcccaaagtgccgggattacaggcgtgagccaccgcgcccggcctggagcgttcatttttttaaaaaacaaacacttaagtgcatcatcacataatgcactccttatccatatctacatgaaacaaaaaaagaaagtctcggccgcgcgcagtggctcatgcctgtaatcccagcactttgggaggccgaggcgggtggatcacgaggtcaggagatctagactgtcctggctaacacggtaaaaccccgtctctactaaaaatacaaaaaattagccgggcgtggttgcaggcatctgtagttccagctactcgggaggctgaggcaggagaatggcctgaaccctggaggcggagcttgcgtgagccgagatcgcgccactgcactccggcctggcgacagagcgagacaccgtctcggaaaaaaaaaaaaaaaaaaaagaaaaaagaaaagaaaaagaaagtctcatagagataattatatacatgtcgtagccttgaaaactcaaagaaaacgattaaaaataatccaataatacagtaattttaatcatcagttttatcctcaaggtaaatttaacagatatacttcttaaaagtagccagcatgctgggaaaatatgttaatagtcaggagtatgttattatatatcttctgcagtgtattttctcatttatgcaaaggaagaacctggataaccccagaacacaaaaggaagatcaatgctcacagtcttgcttctctcctattctattttctaggagaaacagttgatttggttaaacatttatttgaaatagtgtatttggaaatgctataggatgatttcaattgtttccttctcaaagaaccaaccactacaacaacagtatgaagcttcacttgtgaatgattatgggaaaataactacaattaccttgattccaattatgcacaaattcaaggctacttattctaatagtacatgaaaactgtatttttgctgtgtatgtgttataaggcaataggaagatatgcgtattcacaaatggtttgtaggtacggagaaggattgtatattcaagtaatgtaatttttgatacctgaagacctcaaatgtcaaatgtttgtcaaaaagctgctttaatcacccctgaaccaaagatatattctgtgttctcctccagtgaactctaaagtgaacgatctacattttaagtttgaatacttgttagatcattcattttaaccacctcaaattatgaaaagtttattagtaatatacattcaaaacattgtcttcaaaaatcagattctgttttctggccactagatgtcacgattactctgtttggaaagacaatttgaaactgatttgttagggtgcagtatttctggggctagcatacagacattgattttgtatttttctgcatttgaatttaaaccggcaaatatttgaatcacctagaattctaattttttataatttatcaatgatgacaagaaaataaaattaaaatgttactgctgtcttagacaaatcaatgtccatctgacagagctgagaatgtcttcccctccaaggaagaattcttaccaggaaggaccacaggatcagatttgcagtttataatgcagtgtgagtgggacggtgtgaaggttaacaaggctagaaagggggagcaactattgcagaatcagggtgaaatgataagggtcagagtcaaggtcgtggcactggaatagagagcacaaggcattcagaaaatagaagagaataattcactgtcagcatgcggtaagggagagggagaagtgacagaaatgactcaggatctgaaccacagcctgtgtggccagtgatgccagtgttggaagaactcaggaagaagagaaaatgactacagaaaaggggtgtgtccacttgggacagactgacttttaggatgctgtcttctcatttctcccacttttctgtatcttttaggactttggtttccataataaaactgtaatcaggattctcattgccagaagtgaaatagacctgctgaccataaggaaacgatacaaagagcgatatggaaaatccctatttcatgatatcagagtaagtttccgacacatgatttatttggacccacattttctcctttttgaaactgagataaaagttctcattcaaataacttcatggcagactctaaaaagttaactattcagacagggataacctagtttttttcctctacacagtctttagaacatcggcaggtgctaacttagaaaaccctttacctcagctgggcgtggtggctaatgcctgtaatcccagcactttgggaggctgaggcaggcagatcacgaggtcaggagatccagaccaacctggctaacacggtgaaaccccgtctctactaaaaatacaaaaaattagccaggtgtggtggcacacgcctgtagtcccagctacccgggaggctgaggcaggagaatcgcttgaacccgggaggcggagcttgcagtgagctgagattgcgccactgcactccagcctgggcaacagagtgagactccatctcaaaaaaagaaaaagaaaaaaaaaagagaaccctttacctcagcgacagaacttattcctctttgatgtgttttacccagaagcattgatgcagtcatgcaaaatattcattctctataattgtgcttaaagagctaaattctgaagtatgatcaggctcaggaaaaatatatattgcaaaaggctgcattacttttgaagaggtttcttaaatcagttgagctgtcctctcatattgtcatagaaggcagggcagtcagtcaaatatcataaactgctaattcggagggacttaatgttcctagctatatacaactctacatatccttatccctttagcccttgaagggcaaaggagcaatgattcagtactgaacaagccagtgttttcattctgatacttttaaacttcatgcattttgatacaacctaacaaagaatcctcagaatatataggaccatttactaactgagagcctagtggaaaataaaaatgcttggcactgtgttcaaaaaagtttcaagaatttcaggatggggagagcagagcattaaaccaagccaagcacagggacataagaatagaactgaacttatattttgtgcagaactaaaagctattaccttgttcacgttgttttcatctgaaatttgtaattccaagaagcagtgttttagtttattgaaagagtaatctagaagcaatctaaagcccaagagatcacataatacagaagactttgtaggcctctggagagctgaaatggtttctaagaggaagagttgatggagcagttaagagaaatcttattccttcatctttgataaaactctcctacagccactttcaaaactctaaactcttttagtgatgagaaatgcatggcataattcattttctaaatgaatacattagttcttaggcacttattataattaatcacaaccgactcaaagtctgctaatatgaaaatgtaattaatgtaactttgctatgtacatttaaagtactgaattatcattacatgactttgtgccaaagcaccttaatatgaaagttgatacttaacaaagaaacattttataatatttatttactactatcattgattttggaaaatatagaaattatagaagaccattacaagaaaattaaaacctccctaattttctacagaaaatcattaataaacttttattctgctatggtgtgcatgtttgtgtctcctgaaaatgtatctgctgaaattctaaccccaaagaagtgatgatactaggaggtggggtctttgtgaggtgattaggtcatgaacgtggagcccatgaatgggattaatgtccttataaaataggccaaagagaacacctttgtcccttctgccatgtgagcttagaatgagaagaaggctgtctacgagagacaggcactcagcaggcaccacatctgcttgatcttggccttgccagcctctagagctgttagaaataaattcctattgtttataagtcacccagtttatggtacttttgtcacagctgcctgaacacactaagacaggtactttcagtcattttctaaagctatataaataataatatgttttgctatgtaaaagagtatttttattgaatcatggtattctgctgtataagctataaagtacacaaactacctcacattattatacattgcttctcagtttttcactattatacataatattatggtgtatatatttttagcacaaaactttgtgcttatcaatgattgataataactttcttaatatatatttcttgaggtagaattactacattaataattataaatatttttaaatcttttgagacatattaatttgttctccacattctacattcatttataacaataataataataacattagggtacatcttcctaaagttgaggagaatatttaattctaaggcaagttcttataaatacacattcaggttcaaccgactttatgtaaaccacatactactgactgtaaccagagcattattcttcaacaactttcattgggagcagtacttagggcatgttaaacctttagatgagaaaagtaaataagtttagaaaggctaatggtccatggctctttcatagtgcagtccagaggaattatgcttcctttttagaactattatgatattttatttcaaatatattatatttttcttttcagaattttgcttcagggcattataagaaagcactgcttgccatctgtgctggtgatgctgaggactactaaaatgaagaggacttggagtactgtgcactcctctttctagacacttccaaatagagattttctcacaaatttgtactgttcatggcactattaacaaaactatacaatcatattttctcttctatctttgaaattattctaagccaaagaaaactatgaatgaaagtatatgatactgaatttgcctactatcctgaatttgcctactatctaatcagcaattaaataaattgtgcatgatggaataatagaaaaa

SEQ ID NO: 559 - DNA, 47475 bp, Homo sapiens
ccggcccttgtttcgttgggcccggacgggacgtgcgcgctcaaaggttgcccgtctctgacgcccgcatttcctggtctggagccggctgagccacagcagggtcgccgcggggtcccggggccgtgctcccctgcccctcccgggagcgcgcggggcggggcggggcggggcgggaccaggcgggcgagctgggccctcgcccctccctcgggcggtcacctgggcacgggcgctgcaggtgtcggggcctcaaccttgcggagccgacagccatcgatcctcgggtgagtgcgggcgcaggtggagggcgcccggcgctctcgccaccggcgtcccagcctcggggcggcgaacggtccccgcgccgctcccagcctccctggccgggcgttcagcgcgcctgggaggggaaggaatttcctttgcaggaactcaggggctgggggttctctgctacttaagagatccaggagtggagcccggacgcccgagccttcctgcttcgggatggggattaccgcggagccttagcaactggggtctgtcgtgggtttgagggcagggggtctggggaatgggcgtgtcccgcacccagagactcgccaccctctctccaggggagatgctttttaaacatgacaaacccagcaaggttatagaaatgggtgtatgcaactcttcgctctttcctggcgcccagaggtgaatagtctcacacacacgcgcgcgcgcgcgcgtgcgtgcattcattggggccgactttgcctcccctcccctggcctcgagcgttggggacggcgcccccgcccgcgcccgccactgggattaagccccagggccttgcccggctatttgttttccgaggccgttgcgtccgggtaggttcctggatgaccatcctggctggctcaaaattccctctagattacctgcgaccacccccaggaacccggagactgaaactccttttctcacctgcgcaggtggcctcgaggtggtggcagggccgccccctgcagtccggagacgaacgcacggaccgggcctccggaggcaggttcggctggaaggaaccgctctcgcttcgtcctacacttgcgcaaatgtctccggtaaggggaagtgtcgcttaaatcccagagataacccccaccgagaagcatcacaaaagacatgaacgagtgtttagctctcaggattgttattgcttcgagtgaaatggtttcttgtgtgcttttgtgcatttatatataaatataaacatatatgtatacatttgacaagctctaagaccggcacttgtgatatctccagaatagagttattatagttatttggaaattgtcagtgaggatcagcttggttgctatgcgaattgcagggaggaggacctgtgtgcagtttcaaaacgatttaagagaaattcggtggcaatacaaggtgtggacgttggttggatcctgatttgatgaatgttttttaaaatggagatgatgcccgagtgcggtggctcacacctgtaatcccagcactttgggaggccgaggtgggtggatcacctgaggtcaggggttcgagaccagcctggccaacatggtgaaacccttctctactaaaaatacaaaaattagctgggtgtggtgacacgcgcctgtaatcccggctactcgggaaggctgaggtaggagaatcgcttgaacccgggaggcggaggttgcagtaagccgagatggcgccactgcactccagcctgggaggcagagcgagactccgtctcaaaataaataaataaataaggagacgatgaaggacatttctactgattatttgatggtatcaaggaaattataatagttctgtttagttacttttggtaacggtatcctgattaaggtttttaaaatccctgtagagacacagactgaagttgaaatacagctttgggatttgcttcagaattattcagttttagatgctagcagagaagggaggggaacaagatgagaggagattgttcatggattgttaatagttgaagctgggaagaacacatggacacaggcaggggaacttcaggcacgggggcctgtcggagggtggggggaaaggggagggagagcactaggacaaatacctaatgcatgcagggcttaaaacctagatgacgggttgataggtgcagcaaaacaccatggcacatgtatacctattaacaaacctgcacattcagcacctgtatcccagaacttaaagtaaaacaaaaataaaaatagttgaagctggatgatggttatggaagtccttatgctattgtttcagtatttgtgtgtgtttggcattttcctttaaacagaacaccaccacttgtggagcttttttgcataaggtaggtttggcactgcagccgagtctagatgcaaggtcttccgcagacgctcgttctttgtaaattgggtgtcaaggctgcttctccagactcggtcataaaaagtttttttctccctactggaggtgccgatttattttgctcagaaggcagagggtgtttgctgagtgtgacaaagctgagcggatcaagttgatgcaggtggaggctaggtcagctttttttacacaaagggcattagcaagcctgggggttgattgcctccggtcgggcggattgtataaaacgtgttagcagtttttcctaattgcccaaatcccttccaagttgtgttcatcaaaaaacagagtttgcagtagtgaacacacgtgtcggtatgcacttaggatttatgtacacttctgaaagcattgcatgcctcagtaaaaagtgtatatgatgaaaacaaagcacaagatgagtagagggctgcttattgcttgagagagagcttagctgtgttgtgttgcctatttcatctttatcttgtttgcttcagcgatcatgacatgtaaatatttagcaaagcactgactcctaaaagttctgcatggtggtaacacattttttttaagaatcatgcttgaaagagggtaaggaaggagtaatagctatatcttcatcaggcttgctccagatttcttttctccagatttagcctataattcctactcattctgtcatgcttggtcagtactttggaatagtgattctgagagggagctgttgaagttagtagagggaggaaggggaggtatatttccaaaaggtaaatccacattttttagtcgcttcagtataactgaatgtaatgccttttgatttaaagataaaacaagtcaaagagatgagatctgggacagttaaaagttgaagtgttcggtgaatctccccggcgtagaccttgctcgtgtagattcactagtctaaaggatgtaaagatttttttttttttttttttttgagacggagtcttgctctgtcacccaggctggagtgcagtggcgtgatctcggctcactgcaagctccacctcccgggttcacgccattctcctgcctcagcctcccgagcagctgggactacaggcgcccgccaccacgcccggctaatttttagtagagacggggtttcaccgtggtctccatctgttgacctcgtgatctgcccgcctcagcctcccaaagtgttgggattacaggcgtgagccatcgcgcccggccgtaaagatgttttaagattcggttgaggaatgctgaagcatgtcctaatttcactgctgtgatgggaaaataatgagacaaccaacaaaaatccccttacagtggggggagataccacagtgaattcatgatggttcttaaatgaagtgaaattgtttggtttgtggctctgttttcttggtatgaatgaaagaagtatgcaaccgtcacgtaactttattttatacctcagtttcctctctagttccctaaaagcatggaaagagaaaagaaacttgccaggccctttagtgaccaaactaatgtttactctcctctgtaggagagtggtagatttggactctggagagttgattgctaatagccattttaaggacttaccacaaatgtgacaccatttcgccctgattcacattattaagggtatgaacgcattagaaaagcaaatggctcccttgttgggctagaaatgataggaaagagtgttggcaatctagtcaacagtattctcctagattcataaacacttcgctttcatctgcatcacctcatcccatcctgtgaggcgaagcagtggtgatagagggcaattttggtttttaacagatgggaacattgaaatataaggaaatcagcctgggcaacatagtgagaccttgactccacaaaaaataaagataaataaataaaaattagccaggtatggtggtgcacgcctgtagtcccagctactcaggaggttgaggtgggaggattgcttgagcctgggaggttgaggctgcagtgagccgtgatcataccactgtactccagcctgggtgacagagcaagatactgcctcaaaaaaaaaaaaaaaagaaagaaagaaatctaaagaagattgctttaaatcacatctttagggagacagggaaggaaatttaacatttatcaagagttcattggccaaagaaaagagttcatgggctgggtgtggtggctcgcatctgtaatcccagctctttgggaggctgaggggaggaaggtttgcttgaggccaagagttcaagaccagcctgggcaacatagtgaggcccccatctctacaaaaaaaaaaaataaataaataataataataataataaaattggccagtgtggtggtggctgaggtggggagggtggcttgagcccagcagttctaggctgcagtaagctatgtttgcaccattgcacaccagcctggacgatagggcaagactctctctcttaaaaaaaaaaaaaaaaaaaaagaattcatggtagtcttctggtagtcttcacacactttttttttttttttgagatggagtctcgctctgccacccaggctggagtgcaatggtgcaatctcagctcactgcaagctctgcctcccggattcatgccattctcctgcctcagcctccccagtagctgggactacaggtgcccaccaccacgcccagctaattttttatatttttagtagagacggggtttcgccatgttagccaggatggtctcgatctactgacctcgtgatctgcccgcctcagcctcccaaagtgctgggattacagacattcacacacatttttgttttttgttttgttttgttttgagacagagtttttgctttgttgcccaggctggagtgcaatggtgtgatctcagctcactgcaacctctgcctcctgggttcaagcagttctcctgcctcagccttccacgtagctgggattacaggtgccagacaccatgcctggctaatttttgtatatttagtagagacaaggtttcaccatgttggccaggctggtctcggaactctcgacctcaggtgatccaccctcctcggcctcccaaaatgctgggattaaggtgtgatccaccatgcctggcccacacacgtttttaattctgacaaatgtctctaggttgggtattatcagtccattttgcaaatggaagttgtagctagaggttaatagtttttgcctgaggtcttgcagctagattcaaactcagctctgtcagatttgacagtctgcgttatttctggcagtttcacactacctttagcaggaagcagagcaatacgcccaagaattgggtagtctaggcaaactatcttcttatcacaccccactgtcctggtgacaggcggggggcatgggtcacatctgaccaacagatgttctgtcgggccagcatagagcttaaaaaaaaacactgagtgagcgttgaaaattgggaaatgtcaaatattctgccctaacgattcccaacggcaatactagagcagctgcctctttagggaagggtagtacatcccagtcccctcagcccccagcaacccctaaaatagtccccagccctgagattgtacttttttttttttttaacggtaagagatctttctatgtatgtgtctctaccccaaatggaataacaaaatataggttgagaggctcttgttgcaagaaaaatgggaaagacactttgggaggccaaggtgcggggatcacctgaggttgggagttcgaaaccaacctgaccaacatggagaaacctcgtctctactaaaaatacaaaattagcctggcgtggtggtgtatgcctgtaatcccagctacttgggagactgaggctggagaatcacttgaactcagggggcggaggttgcggtgagccgagatcacgccattgcactccagcctggggaagaagagcgaaactccatctcaaaaaaaaaaaaaaagagaagagaaaaatgggaaagagcatattcctttgaggaaatgagagtcttgtgtttagtctcagtgcttctctgtcagacgaatacaagccgcgttgtcatttttctcccatgctgcctattttctcacttataaggaacttgttcgctaccccctgcagtttgacaagaatggagtaggtgtgggcaggcctcagtagggaaaaggaatggctccaaactcccacaccattgggtctttgtgagtaggcaggtgggtcttgtgcaccttggcggttccccagggtgtcctgcagggatggggcaccaaaaaggcctttaacccttcccctttaagcaggggacccatgtggatcctgaagttgtgcatcagctcactgtagctgctctgagctggaccccagccactctgaggggttcctaggacttgcaaagggcccctctcccccatccttctctgcctaccactctcctgctgatgacaagtccacttctatacactgcttaggcacagccccccaagaaagctctgcagggatgaggagctgaggcacccgcatagtccagccttaaggggtttctgtgatgcaagtccaagggtggcttaatttccttgccttgaaactttcggttaagggtcacggggcaaacattctcgcttctgtgaatagctggagtttcatgacagttgaagtttctctttagatctttgtttccttcccctgagttctgcattttcttcccatgtacgtgtgccgtggaggagaatgaaaagaggaaatggcacaaaagtgaaccttgttgggtggctttcaggaaatgtcaggtgctgttgtgggcctttgtcactcgagttgtcagtctaggtgtgtgtgtaaacggacatggaataaacaagggctccaagtggaacagcttgttttggccaaaagaagtgagttcaggccgagcatggtggctcacacctgtaatcccagcactttgggaggccgaggtgggtggatagtgaggtcaggaaatcgagaccatcctggctaacacggtgaaaccctgtctctactaaaaatacaaaaaaaaaaaaaaaaaaaaaaaaaaaaaaaaaaaaaaaccaattagccaggggtggtggcactcgcctgtagtcccagctactcgggaggagactcgcttgaaccaggaggtggaggttgcagtgagccgagatcacgccactgcactctagcctgggcgacagagcaagattctgtctcaaaaaaaataaaaaataaaaaaagaaagaaaaaaaaagaagtgagttcagaggctgacatgttttgtgaatgccagaccagcggcttgatgggatcctttctggagaactctgcgattcaggtttgtggctgtgtgctccctcaggtgatgattaacccccttgtcaaggaagagtgggttaattggttattagccagagcaaacagggagaggccaagcagtcttgagtatggactcagccagatccctgggtttcatttctggttcttccaccacctgtgtgaccttgactcattttttaaaacctctttgtacctcagtttcccctatgtaagctagaagtaataataatacctacatcatagggcggtgaggattcagtggcacgtcaagtgcttgtaacagtgcctggcatggagtaggatggattgtgagttagctattattattgttgttgttagagccctgcttcctttactttcacttttactggggagaatttcccccacataatgttagaagaaagaccacagggaagaaatgcatctgagctctgacctctgttcgtggagtgagccatgggctgcccatctgggttcccacatggccttagggaaatgttctccatgacaaatgctaacagggtgtttggtgcagcagcagctttggaattgatgagaactgggccacaacttgtgactttgagccagggctttggctttgttgttcggggattaaaatctccactgactgtggaaaggagttggaatcccctagcattcatgtggatacaaactccaaccccttatgagagagcgggctagtgttagctgggacacaggagtcccagcctcagctatgccaccgcctggcaggggtttaaggccaggtcttctgggcagccagtgcctcttctgtcacctggggataagcatatctaataggaatgttgtgaggggctaacaacattttatgaaatcctgacacagacacagcaaagtacaatgcctgacttgccccttagtagtaaaatcatagaacagatacattgagaggcttactttttaacttggaaaagtaatatagatgctgttaactaatgtttatttaatattttatagttcctaaaagggctatctggtttgatctttaaactagcaatgcaggtttctgtttgtttacatttgtttcgattgcctttggctgcctgtttcaggagaggaggtacagaagtgaacccaggttcaggccagaaatgagaacatggaatggccttcattttactgtatcagagaggtaacatgagttcttattctttatgcccttaagtaattctgaggaggaagcactttagagattgatagctaaggtgttgctgggaagctgaaagcatccatggtgtccagggaagctgaatggagggccagtgattcccctccaagcagcagggcagaggtctcccctgtcgacagcccttgcctggtccccttcagcagggggcagtgggaggaagagaggcagtaggctttggattctccctcctgccccaggtgcagacccaaagcttcagagtccatcctaccttcacctaacccttcgtccttctcctgcactccagccaggtgtttcagtgtgtagtctgtacctgccacaccctcaccgcatccccccaagcctgcactgtcctgttcaccgcaaggttttctcttcttcctatggcctcagctactttccattgctgcccttgcctcctgatcctgcctgccttcaactttactgtattctgaaaggtttaaagggaaaagtcttttatgacccacaatccaaggatctgaaggcattgacatttgggtatatttcctttttattttgttttactttgtttttttataaatttaaaaaattttaacattttataaacaattcattttatgttagaattttaacatagttgctatactttgattaaaatttatcattatgacgatatcaaaaagacacctgcatgcatatgtttatcatagcacaattcacaattgcaaagatatggaatcaacctaagtgtccatcaaccaatgagtggataaagaatatgtgatatatgtatatacacatcacatatacacatacatatatacacatcacatatacacatacacaacacaccatggaatactgctcagctataaaaagaacaaaataatgtcttttgcagcaacttggatggaactgaaggacattattcttttttttttttttttttttgagatgaagtcttgctcagtcacccaagctggaatgcagtggcccaatgtcggctcactgcaacctccacctcccaggttcaagcgattctcccacctcagcctcccgagtagctgggattgcaggcatcagccatcatgtccaggtaatttttgtagcgacagggtttcaccacgttggccaggctggtctcgaactcctgacctcaggtgatccacccgccttggcctcccaaagtgctgggattacaggcgtgagccaccatgcccatgaaggccattattctaagtgaagtaactcaggaatcgaaaacgaaatgccatatgttctcacttgtaagtaagtggaagctaagctatgggtacacagaggcatgcagagtgatataatggactatggagactcagaagggcaggatgggaaggggatgagggatgaaaaacaacctattaggtacaatgtacactacctgggtgatgagtactctaaaatcctagactttaccactgtacagttcatctatgtaaccaaaacccacttgtacacctaaagctattaaaaaattttttttaaataaaaaatcattgtattcccctatgtctttataaatgtttttaatgactgcatgctattttaggcttttttagccattcttttaaaatattagagaactaagttgttgctcattttttgatgttgtacatcattccaatttgaatgcacataaaccttggatcccatttcacattatttgagatggattcctgtaaaaataagtactgagtcaaaggttttcaacattggaaagttttctttcttatcacaaaagcaacagatttgtattgtggaagatacaggacagtgtaaaaagtaaacatgtacctctattctcaccaaccagttgctgtttgtgtcgccgggttctccccctccaggacaaatgtcctcttcaggcttgctccatgcgtggcctgtcggctggcagcatggcatcacctgggagcttgttagaaatgcaaaagctcaggcctgccccagacattgaatcagaatctgtcttttaacaagatctatattcaagtttcggaagtcttagtccctgaggccaccaccttaccagtcacggtgggctggcattaattacctctgatctgtgaatatacgtacatttttcctatttccctgatactgggatgtaccactgtgtctaccactggtttgcaccctcctgtctcccttaacgtaagaccgtgtaaggacaagagcaggctcccctcagtaacaccggttcagggatcagcaggatctcatctcatccccctatgagaagccctgctacacacagctttatcttgtatctgtcatttaacattatattgtcagcattttcctgttatttagtttttctctcaagtttatctttcatggctgcaggtggtaatccatcttatgactgtctgataattcatttgactcattccctattgttagacattaagttgttttgattcttttggggactggggagggtatactgtgggctattataagtatgccaaagtgaactgcttccgcagtaattatttccctcaacccagattatttccttatgacaagttaccagagtgcagacactgggtcaaaaggcatgaacgttttaaaccctccttaaaatgccgcaggagtatacaaagtgccctgacatggtgccctcccagacactgggtagtgtggtctgtagacagactccagggagcagggtcatgcctcattcgcatcacgcctccagggctggtgtagagccaactctgagggtcactctaaggggacctgggggaatggaaaggaagtgacggaaggatgggcaagctgcctgtggtggtggtgctcctttcctcctggcctgagtcctgagtcacagtagatgtcactgaccaggcagcagccttcctcagggtgtgtccacaaagtttagcctttcctcccggcacccgtcttccagtggcttgggagctggagcaggtggtggaggcctgaaatgactacttggtgagtctggaatgtgccggacctgattgctgccaagcttgtttttgcttcacgagtctgagactgttgggttctctaatacttttttcctctcaccagcagaccaggaacctgatattaagtaaactttattctaaaaggtacactcagacaattccttttttttttttttgacactgagtttcactcttgttgaccaggctggagtgcaatggtgcgttctcggctcactgcaacctccacctcccaggtttaagtgattctcctgcctcagcctctcgagtagctgggattacaggtgcctgccaccatgcccgcctaatttacttcttcttctttttttttttgttgttgttgagatggagtttcgctcttgttgcccaggctggagtgcactggtgcgatctcagctcactgcaacctccacctcccaggttcaagtgattctcctgccttggcctcccgggtagctgggattacaggcacctgccaccatgcttagctaatttttttttttttttgagacggagttttgctcttgttgtccaggctggagtacaatggtgcaatctgctcaccataacctccacctgccaggttcaagtaattctcctgcctcagcctcccaagcagctgggattacaggcatgcaccaccacgcccacctaatttttttgttggtcaggctggtctctctgccagtatacaatcagttcccacctgtagccccagatagccattgaacttctttctgtctcttgccttgtctgggaaatttcaaataagaggaatcttgggatatgtagttttatgtgtcaggcatctctcacttagcacaacatttttgaggttcatccatgttgcagcatgtatcagtagtttgttcctttgtattgctgagtagcatacagttttataaatgtactgcattttatttatccactcaccagttgatgaacatttgaattgttcccagggcttggctattatgaataatgttgctataaacgaggtaatgttgctatctacaagtgttagtatggaccttatttgtatttctcttgagtagatttgtaggggtataattgcggagtcatgtggtaagtttatgtttaactttttaagaaactgccaaactattttccaaaagcggctgtgcaatgttagagtcccactaacagtgtatgaggattctctacattcttgccaacatttgaaattgttagtcgttcttattatagatattccaaagggtatataatggtgtctcattggcagttttaatttgcatttccctaatgactaatgctgttgagttccttttcatgtgcttattagttacttatatgtcttcttttttattggatatttgatctatattgatatcaatatagatctatatcatctttgatgacacgtctagttacatcttttgccccattttaaaactggattatttctcaccatcctcttattgaggttcaagaattttaaggtatatatctggatgcaaattctttatcaaatatatggtttggggctgggtgcagtggctcacacctgtaatctcagcactttgggaggccaaggccagcagatcacctgagatcaggagttcaagatcagcctggccaacatggcgaaaccccgcctctactaaaaatacaaaaattagctgggcgcggtggcatgcgcctgtaatcccagctactcaggaggctgaggcacaagaattacttgaacctgggaggcggaggttgcagtgacccaggatcgtaccactgcactccagcttgggagagagaacgaaactctgtctcaaaaaataaaaaaataaaaaacaaataaatagtttgaaaatattttccccagacccatgactttttccctaatggtgccttttaaagaaaaaaaaagttttaaattttgatgaagcctaagttgttgatttcttttatggtttgtgtttttaatcttatatctaataagtacttgctgaaccttatacaagtcttgtggacatgttttgttatgtttttgagatggagtctcactctgtcacccaggctggagtgcagtggcgcattctcggctcactgcaacctccacctcccaggctccagtgattcccctgcctcagcctcctaagtagctgggattacaggtgcacgccaccatgctcagctaatttttgtatttttaggagagacgtggtttcaccatgtcgaccaggttgatctcgaactcctgacctcaagtgatccgcccaccttggccttccaaagtactgggattataggcgtgagcctctgcacttggccgacctgttttaattactcctaggtaaatatctagtagtagaagtactggatcataggataagcctatgttgaaatgccacactattttccaaggggatacaccattttacacctcaaacagcagcgtataggagttctcgttactctacatcttttccaatatttggtattgttggtctttctgattttagtcattctgatggatgtgaaattgtatgtcattgtcattttaattagctttatcctgataactaatgatgttgagtacctttttgtttgctattggccatttgtacatattctttttggagtgtctttttaagtattttgcccatttttgtttgagtagtttgactttttgttattcatttgtaggcactctttatatatgtggtctggtagtctgggcacaagtcttttgttagatagatgtgttgtaagcattttctcccagtctgtaattgccttttcattttcttatgatgaacagaagaatctaattttaatgagttcactttatcaattttttttctatttggtgctttttgtgttttgcttgagaattctttactctaaggttgcaaacatattctcctttgttttccttgtagagtcttaccttttatagctatgcttgtgatctctcctgagttaatttctgttaatggtgtgaagtggagttaaggtcctttttttttcatacggttatccagttagtccagcacagtgtgttgaaaagactttcctttcctccattgaattgcattggtactttcttataaatcaagtggactggtttgaactcttaagctcattgtcttgagttctataatttataagtcttgaaatcaggtagtgtaagtcgtccaactttgttattggctattctaaccctttgtattttcatatatattttagcatcagcttgtgaatatctttaaaaaagaaaaaggcctggttggattttgatcagaactacattgaatcaactaatctggggaggattgacatgttaataatattaatcttcttatccatgaacatggcatatctctgttaaggtctttaggtttttttggcagtgttttgtagcttttagcattgacattttataaatatttatacaaatttattcttattttatgtttttgagtctattggaaatgatatattttccttcatttttgaattttgttgctatatatagcaatgtggttttaaaaattgacctgtgatcttaactaaattcatttattaattccagtagattttttgtaagtaccttaggattatcaatatacataaatgccatctacaaatagttttatcttatcctttctagtctgtatgcctttcttttattttctcgccttactgaatgggctaggatatcctaaaatgttgagtagatgtagtaaggacagatatccttaccttgtttccaattttaggggtaaagtggtcagtctttcacacttaagtataatgatagctatagatttttcatagatgttccttatcaggttgaggaaaccatcagtttcctactttgctgagaggtttttatcatgaatggttgttgaattttttccaaagatttttctgcatctctcaagatggtcatatgcttgttttctgtattcagtaatgtgaatatatttatttttcatctgttggcactttctcttcacctcaaattagggaaaagaccacagttacccattttggttttttgtttttttttttaattactcagctttaacacttgaatatcttggcatttgtgcatggaatattagttcaggaacatgatttagacaatttgaatcagacaatttccataaaatattttataaactaaaaagcagcgtttgtgtgtgtgtgtgtgtatgtgtgtgtagagttatttggcttgagagccctgcctgcccaacaaacttatcttaaactctcatcattattagtctcatgcttaaaaaaaaaaaagtatcatttaagtgaagacttcaggcagttgagggagcaagctacatgagtataagaaagaagaccatcccaggcagaatggtcttctgaagcacaagttcaaaggccctgaggtcccagaggtatccagaaaactgtctcttcaaaattgcttttgcctgacattgaagcagacagcaggggctaagaaaacatcaccaccttctggcagaatagaaggactgagctgctcaggtcaaatcattatagtaaaatatacctaaaatttaccatcttaaccatttttaagtgtacaggtcaatggcactaagtacattcacattgttgagcaactgatactgctatctacgcatcttcagaactttttcatcctgtgctgaaaacctgcacccattaaacagtaactcctcattcttcccttctcctagctcctggctactgtttactttttgtctatgaatttgattattctaggtacctcatatatatgggatcatatgatatttgtcatcttctgtctgcttattcacttagtgtaatgtcttacgggttcttccaccttcagcatgtatcagaatttcttttcttttttttttttttgagacgaagtcttgctctgtcacccggggtggaatgcagtggcccgatcttggctcactgcaacctctgcctcccaaattcaagtgattctcctgcctcagcctccctagtagctgggattaccgccatctgctaccatgcccagctactttttgtatttttagtagagacagggtttcaccatgttggccaggctggtctcgaactcctgaccacaggtgacccatctgccttggcctcccaaagtattgggattataggcataagccaccgtgcccggccaggatttcatttccttttaagactgaataatattctactgtatggatataaagtcgttcttaggagatgtgtatgttatatttctgaatcctgagaatggaaacaaaacaggtagaatggtagtggggcaagctggcgtaggtctgggatactgttaccaaagacttataggagaactggaccccggctgattgggtcctgacatcacacctgacaatgtgatggtgaaaaaaggatctcccttaggtggttgttctggttcagtttctcagcaatgatgaataaccgtggtttcagaaaccatgaacaactaagcatgaagaatgtcataacctctctggtggttgagtcatacaaggagccacattcagaagcccgggatggagagtggggtctcagggactattgagcacagatttctgattgctactttccagatcattgtatgcttaggccgtttattttgatgaagaaagcaagactaaaggacatgataatcattgagaaccaggaggcaatctctagttcagatgttcttttaaaaactttttttttttttgagacggagtctcgctctgtcccccaggctggagtgcagtggcgcgatcccggctcactgtaagctccgcctcccgggttcacgccattctcctgcctcagcctcctgagtagctgggactgcaggtgtctgccacaacgcctgtctaattttttgtatttttagtagaggcggggtttcaccgtgttagccaggatggtctcgatctcctcacttcgtgatccgcccatctcggcctcccaaagtgctgggattacaggcgtgagccactgcgcccggccttaaaaactctttttaaacctcttctgtgagcatgtttgctaagcggtcagcccataagtatctgaacaactgttcttataatcctttgttgctcttattaatcccattcctatattgttgattttttttaagatatattttctatttgttgatgttgttcttaaaactcagtacctgaatgactagtacaaggtatgcaactcctttctctttaattctgaaccttatacttgtattacttatctgttcccaccaaaatgatgacgaggtgaatatatgtgtagaatttgcagtcaataaaatacagtcacattgtaagggaagtttatgtgaaaatatacatcaccagaatactaatttacaagcaaacataaggcattgagtaaaaattcatggtagctttatagaaaaatgaattgtgtcagtgtaacctgatttgttttcaagaacattttacggatctggaggaagcaggggacataatcttaactttctcatgctattgatttcattatgaatgacataatcaataacagcccggggaaacaggttagctcacatgataccacagttagacggtgggaaggtaacacagagacattatcaaggatatggttccagtgtgggataagtcatcatttaaccttttagaggtcagtctgggaaccattctgtttaatcagttttaatccataactggtggcatattagtgtatatgtttgtatgcgagaaatactagaaacagaagtcaaaataacctgcattaatggggtaccgtatttataaaatactggacagaatcacgtgaaggctaattaattttgtaagtaagaggttcaaattggagaatgattggcactgtgcctatttttggcagaaaaagcctatgggccatggtgaatcacaaggtagttgaaccatcacagtaactataatgtgggtatatgcagaataccacatttcatacatcagtgctctagttaatacttgtatgagactgaaagtaggcaaatgatacagtgaagtcatttcataactggcaataccaagacttctcagaactatgtttagcttgagtgcatactatgtaaagagggtcttacaaaatgtataccggagccacaggagagcaaaacaattatttaagtgatgacatctggtcaagatggcacaggagttcaggctccaaacacctagcaaaggtagttataatataaaaagggtaaccaaataagtatagttgggctatagtcattctagttacctagaatgtaagttgaaatacaaaggggtaagcaggctcaagctgcaggcctctccagcaggggcaaccagaaactcaggttttttagaataaggggatatagctttgtgcagtggccatttcatagccagtgaagtttatctgaggcacttgctaattgaaaacttttctcaataccctgccatgatgaaatatggttggcactggcaatttttgagactctatggagactgaacttaacattaaaaacaaattaaaaaatgaaaagatagggatgtaaaagtatccacatgagctgataccaaggagttggagccaggctccagggaatgtaaattgggagaataactaagtttcttccatacctctaagaaacattggcaacactgaaatcagagactgcagtgccctccctcccaaacctaagaaggaaggctggaaaagatggcttacctggaaggaatgggcttctggaagtttcagagacaaagacacagcttcagaaccagaagctgagccatgctgctttcttggcccagggcctggatccgcagtatcgctgataccacaactgagcaggaacaccaagtggcattttgagacctggtttggaagaagtcctgagaggccaggtggagggactgaaagctgcctgggaagggagagaggagggaaagatacagcaatcgaaaactcctactgaaagtaagcttgcaaagcaaaactttaaaatacatgaagacatagatatggagttcaaaatttgttcaagcaagacacgaatttactaaaagtgaaattagcagttggaattcctggaaatgacaataaagtaagtatgtttagaattcttacgatgaatgaagtcttgcagtagataaaaattatgaagtagaagcaagggggagggataggaaaaagaaccagttagaacagttttgtattaagtcaagtgggctaaaatgctttaaaaagaccaaaaatgcaatggatcaaatccagtacgagcttacttctctcgtgtagcaggcctgggtgggtatttcaggccactgggtggctgtaccctcagggacccagctgacggcacccatatgggtttcagaattgccctgctttcccacaggaagtgggtgggtggggaataagctaggccagaaatggtcttcctcatgtctgctcacgccccaccggccatacctaacttctggggagcctgggaaacaggtcagccacgtgcctgggaaaaagaagggaagataaaatggagaataagtttctgccatacctctaagaaacagtggttacattgacaacagatttctcatcagcaatagaattgaaaacacaagagagtattatcttcaacttagaattcaatactagttaaaccgtcattcaaaaatgatgatcagcagtccctatgaaggaaaaattggcaatatctaacaaaattatgtaagcattcaccctttgacctaatggcctcacttctagtaattattccagaggaaacacctccacaaaatagcaaagaatatgtacagaaggttgttcatcgctacattatttgcagatagaacaaatttggaaacaacctttatgtccactcatagaactctggctgaataagctatagtatatctacataatgcagccataaaaacaatttttaaaaaattaaaaaggaagatagctattaacaaagatgaaatgctttctaggatgttttaaggggcaataaagagtcacaaaaagtatatctaatgtgctaccttgtatttaagatggaaagggaaataaccacacatgtacacacacacatgcacaaacacacacacacacacacacacacacacacttatttttgcagaaagatgcacaggaactataaaccagaaataaatgatagggggtgggtggatattagtggaggaaataagtatggaaatgagacttttctgagcgtacctttttatatagttttgattttgagccatgtaaatattttacatattcaattatataaaattaaaatgaactaaaaataatgaaaacaaaggaaatcctgtcattgaatatacaaagagaaactaataatcaaaacactatatcaaattgattacataaatacaaagaagagaattcagataactttataacagagtactcagactgtataagcttagtggaatatagtcaagggacaaaaagaatggaaaaaattaggctttatttacctggttaattgttgggcaatgctatcagtgtagtaactctgaaactgcttaatatgtattgtagtttgaacaaatgaatcaatatactaatgtcattgggaaccaggttcttttttgttgttaatttcttcattgaaattctgtattcaatcacaggagttggagtctgcttcctgctgggacccttcctgatcctttaagttaatctctaatttgctattagtgtggcttcctgcccttttttttcttcagcttttaagttcaggggtacatgtgcaggatggggaggtttgttacacagggaaacgggtgccatggtggtttgctgtacagattatcccatcacctaggcattaagcccagcatccattagctgtttttcctgatgcttttcttccccccactcccccctctagcaggcccaagtgtgtggtgtttcccaccatgtgtccacgtgggaaccagattcttgctgtgggagatgatctttcaagtatgtatttcactatttcacaaatactgaaataaggtgaggaagactcctgagatggtagctttgcattggaggtatcagtgtgccacccagattctagttttaaaataccatattttcctaaaaaaaacagggctccttgaaaaaaaatgaccagaagtacaacgtgccaaagcgggcatgtgctcagcaactgggatggcaaaagatacatatgggagccagcctgaaggaaccctgacaagatgatttggaaaattttaagcattcaaaagaagaatgatggcagtgaattataacacatttaataaaaataaatcaatgaatctataatgtatttccagaaacaactgccagctcatgaaagcagaatgaatcttagaattagaaaattactattttacaactcccagtgtggtgattaattcaggcaaggataataaacggatgctaaaactatcaggtgaaactttgttatgcaacggattggtctaacagtctcaaagtattaattacaaagggaaaaggtcctctacaacagtaaaatggacgaggcgaggtggctcatgcctataatcccaccactttgggaggcctaggagggataattgcttgaggctaggagttcaagaccagcctgggcaacagcaagaccccatctctacaaaacagtattttaaaaaaaaattaactgggcatggtggtgcacacctctatagtcctagctactcaggaggctgcggtgggaagatcacttgagcccaggagttctaggttacagtgagctatgactgtactactgcactccagcttcagcaacacagtgagaccctgtctcaaaataatactaataataaaaagaaaaagaaatatggcaaacacctccttaatcaagtgacctaacatcacatgaccagtaatgagacatgacataatgggatatatcatctagatagttttcttgccagaaatgtttaatattgagaaaacaattagacaaatcgagattatgtgatattttacaagataactgacctggactcttcaaaaatgtcagtattgccgggcacggtggctcacacctgtaatcccagcactttgggaggcccaggagggtggattgcttgaagtcaggagttcaagaccagcctgaccaacatggtgaaaccacatctctactaataatacaaaaattagccaggcgtggtggcaggcacctgtaatcccagctactcgggaggctgaggcaggagaatcgcttgaacctgggaggcagaggttgcagtgagccgatatggcgccactgcactccagcctgggtgacagagtgagactctgtctcaaaaaaaaaaaaaagaaagataaaaaacaacaacaacaacaaattatccaaaattaaaagagactaacaagacatgacaaatatgtgatccttgattggattttgtattaaaaaaaactctaacaacattgggacagttttaatatggactatgtattagatactataccatttaatttaatttcattaaattaatatttatgggacagttttaattaatgggacagttttaatatggactatgtattaaatactatataatttgatttcatagataaaatgatggtatcatagttatgaaaatggctatccgattataagataaatcatcataggaaaaatgggaaaatatcgagataaaatgaagtcttataagaccacactaagataaccatcattaacactttggtatatttccatctcatctacatatatttaaacaaaattgaattgtactctacatggttttttatgttccttctgcttgttccatattataattattggcaagtctccattaaatagtcctcaaagatattcttttaaatggttatatactatctctgtacattttcttatttttaaatttcaaggccatgcgcagtggctcctgcctggaatcccagcactttgggaggcggaggtgggagcatcgcttgaggccggcagtttgagaccagcctgggcaacatagggagaccccatctctatgattttaaaataaataaataaaaattaaattccaagtttttttattttataaggtctattttacaatattttattcaatcaacatgccatccattgtaagacatcattattttatgtgtcactaaaaagaaaattttcctgaggtgggtgtgtcgggccctactgggcctagcggcaggagggggacatcggctcccaccacagccctccaaacagctctgcgctctgagcgccccctccccagggtccccctctccaggcaggaagatgtccaagtcccgtgcggcggaggcagcagcgggggtgacagcgacggccccgagcccgcagatagtggagcagaggggtccagggaggcgctgcaccgacgttggggagaatgtatgtcctggcaatcaaagatcttttcctccgtgagcctaacaaatgctctggaatgtgttccagccttcaggaggagaactccgttacacgtcacgaagtcaaatgccaggggaaaccattagctggaatccacaggaaaagaatgcaacacggagcacgaagcccaagcacagaagatcaaagacgccaggagaggacccctcgcaccttttccaaaccaaaaatgtgaagcagcagaacttccaaaacctccggcctcgtcttgtgattccaccaatgcagccatcgccaagcaagccttgaaatagcccatcaagggcaaacaggcccccgaaaaaaagctcaaggaaaagtcgcaaactcacggatttctaccctgtcccaaggagctccaggaagggcaaagcggagctgcaatttgaagaaagggaaagaatagatgaattggttgaaagcggaaaggaaagaaggagtgaagactgacctcatcaatgacaaaggccgggtgtgaacaccagagggagctctcccggggcgcctttgtggtagaaaagcaccggagcctcacggagatcaccgacgccacgggacccctccatggtggatctccgtggatctccacagtaagccgagatcgcgccaccgcactccatcctgggaggcagagggagactccagctcaaaataagtagatgactgaatgaatgaatgaacgaatgaatgaatgaatggatgttacaggtttccaaggtggacttaaacagatggctttatattaccaaaacttttacattctagttgtttttgtgcctttttttttttttttaatacaggttgaacgttttgtgcttcccatgcatgcagtcaaaaactcagcacacaggccaggcgcggtggctcacacctgtaatcccagcactttgggaggccgaagcgggtggatcacttgaggtcaggagattgagaccagcctggcaaacatggtgaaaccccgtctctactaaaaatacaaaaattagccgggcgtggtggtgcatgcctgtaatcccagccactggggaggctgaggcaggagaatcgcttgaacccaggaggtggaggttgcggtgagccgagatcccgccattgcactccagcctgggtgacagagtgagaccatgtctcaaaaacaaacaaaaaaagcaaaaaaaaaaaaaaaaaaaaaacctcagcacaggattagagccaaacgtgaactaggaagccgcgcgagtctcctctctccggtggaagagctgggacgtgtcccccacaccgcgacgaggtatgaggaagacgctgtctcccaaaggcctggacgggatggctccaagctcttgttctcctaacatctggacaggcgctctttgaagtgtatgaatatatttttaaaagattgggcagtaagcttgtcttccccgtgctttctcgaaagcttactgagctcgtggccctgagcgcgggccggcatagatttcctcttccacccgctgcggcttttctgagcacctggaagcatcggggtgtgaagtcaaaccagacgtgggtgaggagagtgtggcttgccttccctgccgggcagaatttcctgaaactgggctaattctttgtagaaatgtgaacgctgaatttattaaaaaataataataaaacacaggaaacaacttacatgtacataggtcttgaagtgagtgaagcggctgtatttttttggggggggcattgcttttgtttttgtagaagagattgagatgatactctattctaatcaaaattagagatttgtagtgggaccagaaattacgtacttaatacccctgccagttttccccgcgtcctgctgggttgaaagttccagagctgccgtctaggcctcgtgtttgtcagacacccacggctcctgcgaggtcgcagccatgagctggcgggggtgagtacacaagcccagatcccccaacccgaactgcggctgccagcctcagagaaaggcgcccaggtgtgcgggcagggccgagacccccgggaatctaagataggccaaggttttcacctagactgtcaaggctggaggagtaggtggcggcctcgaccctccctacacgggacccattcttttcttttcttttcttttttttttttttttttttttgaggcagagtctcactctgtcgcccaggctggagtacagtggcacaatctcggctcgctgcaatctccacctcccgcgttaaagcgattcttctgcctcagcctcctgagtagctgggactacaggcacatgccaccgcgcctggctaattttttgtatttttagtagagacggggtttcaccatgttggccaggctggtctcaaactcctgatctcgtcatccgcccgcctcggccttccaaagtgctgggattacaggcgtgaaccaccgcacccagctatgcaggacccattcttactgagtgagactcgggagtcatgacctggtgtctcctgcccaccctggtcccaggtaaatctgaatggaagcaggtatgagagcctgtcctcgcctttgattcccccaccctaccctgggcctcacaacggtgctacctaagaaagtctcttcccccagtcagcctggtgagtggtcagccgaagaggatctgacgggagtgtagatgtgagatagtatctttgttgtacctgtttgtggtttagctttgtatttaaacaaatgaggaaataaacttgaaaattatttgtcatcataaagttgaaacaaaaattattttaaaaaataaagttttattttaaaataaaatagctaatgagtatcgtacattacaattacatttcctttctaaacttttttgttttcctttcagttatctgtctgcttttttttctatatacttatcgctaattcaaccacagactcttctcttttgtgtaaatcttttggtatgttcaaagatatttggaatttccaccttcctggaggaatttctcccatagccatgtgccctactctaatttagattgtgcactctggatctgatgcctagataatcttcaccaacctcggaatcctcgaattgtactctacatggtttttcttctcttctaatgcatcccatttcctggaccgcatgtattgctctcctagtttattattcctcattctgatgacgtatgcctttctttcattggcttcctaagaacttcatgtgagtaaaacatttttgagtatgtggcttcattttatacctacacttaattgaccatttagtttggtgtagaattctatgttggaaagtttctttcatgaaatattaaaaagctttttaaagtaaactaaatacttaaattatttgtgtaattgagaattgtaccaatttgtagataacttgtttttttccttactcaatgtgtttaattttttgaatacttaatacagtcacatgtttagcagaatgttcatagtaggaaaaaaaatgtactgaagtcttcatctcattcatgaccccatctgccaagttcctacccctgtaaccactgtctttaacttttttttttaagagatggggtctcgctatgttgcccagactatactcaaactactgggttcaagcaatcctcctgcctcagcctcctgagtagctgggatataggcatgcacacatgcccagtgctcactttttaagtgtccttccagggtttcttcatgtatatatagaagattacttgacactattctttttctttttcttttttttttttttttttttttttttttgtgacagagcctcgctctgtcacccaggctggagtccagtggcacgatctcggctccctgcaagctctgcctcccgggttcacgccattctcctgcctcagcctcccgagtagctgggactacaggcgcccatcaccacgcccggctaatttttggtatttttagtagagacgggtttcaccatgttagccaggatggtctcaatctcctgacctcatgattcgcccgcctcggcctcccaaagtgctgggattacaggtgtgagccaccgcgcctggccatttctccccttttcaaatgcaaatcatgtgtatttcttgctctattctgtgtcttgcttttccccttaacaatgtgtcttggagacatgtccatatcattacatggagagttcctcatttttaaaagagagctgcatagtattgcactggatagatgtgccataatctacttaatggttctctattggcggacatttaagtttaaagtaagttgtttaagttataatgtagtttccagtcttttgttattttaaacaatgcctccatgaatactcttataaacacctacttttgcacacatgcaagtaaatttataggataaatccttaggagaggagtttttggctcacaggacatatatgtatgtttgtaattttgataaatattaccaggttgccatttgtaggagttgctccagttatattcttcagccccaccagataaataggttaagatacctatttattccacagcctcactagagatactgtgtggacaaattttggggttttgcctatcctttatgaggtaaacagtgtagtttaaatttctattttttcttttatacttcttaattaattttttgagacagtcattctctgttgcccaggctggagtgcagtggtgcaatcacagctcactgcagcctcaacctcctgggctcaagcagtcctcccgcctcaacctcccaagtagctgggactacaggcataggccaccatgcccagctaagttttgtgtttttagtagagacaggatattgccatgtttcccaggctggtcttgaactcctggactcaaacgatccttctgcctcagcctcccaaagtgctgggattacaagcgtgagccgtcgtgccaggcctgtttttttaagagtgatgctgatccttctttcatatgtttaagagcccatttatcctcttttgtgaattatctcttcaaatcctttgttcattttactatttcaatattgggattttgatctttttcttgtttgatttccaggagctctttataaattaggttaatattttaccattttttttcttctagtttgatcagtcccttagaattgaaggcatctctggcttccagtgtttccaaaaagcctgacccccattcccatgtcaccacctctcaggtaaagagcaggaactttgctccaataggccccttccatgtgacctctgcaatcacagtccctcgcttcccccaaaataacttcacttttacagtcatcagcacttctttgcatttagaagttttaccacccaaatgcatatctttagagactccaatttagtcttacctttaaaaaaaaaagttatctgggatgtgtttttttactctctaaattacttctccatttttcccctttgtttttctcttgaagaactggactccttgaccaatagggttttccacagtgtgagtcttgctaattgcatgctcatgattcagctcagtatatccctcaatcctctatttcttgcaaactggcagctggattcagagatttaatgaaactcaggtttgccatataggaggcacaaaatgtctggttgtctctcctgttgagatgatggtaggtacaggtgctaaaatgtctacgtgggtggtgggttggggagaagttgttgcaagatggtggaattctaagtctaaattttacgtttcatttataagttgaaacactctttatttttatttatttattttttgaaacggagtcttgctctgtcacccagctggagtgcagtggtgtgatctcggctcactgcaacctctgcctcccaggttcaagctattctcctgcctcagcctcctgagtagctggtattacaggcgtgcaccaccatgccccactaattatttttcttttttgtatttttagtagagattgggtttttccatgttggccaggctggtctcaaactcctgacctcaagtgatccacccactttggcctcccagagtgctgggattacaggtgtgagccactgcacttggctcattattgccttttcttgagttcttcccctccagtttgctctctttctgtgactcctgttattcagagtttgcacctgttggattggtcctccatgtttcttaactatttctctttttatttcactttttctaggaaatttcccaaacattattttccaactctctgtttaccttactacttctgccatcatattttattttccaagaggtcttttttgttttctgttgttattataaatagcctcctcttcttgtatggatgcaatattttctccctgaaaacaatgagtttttaaatagctttcttctatctagcattgtgtctatttcctccaagttgtcttttttctgcttgtggatttgtttaactttcaatactagagattttctttgaatgtctgaggatctttggatgtccagtcatatttataagtagggcagtatctaggctgtttcttcagggaagattcaatgtagtatctttagatatttcttcctgggctgatgcctagagagaactgtttgagtctttatatcttgtaataatagtattcctgaaatccaactgtaaaaaggctggagaggtctcaacttccgctatatgtatttttatgcagtctccctgttatcagtatgatgctcctctaatcctcaactctgcctaccgtccaaagattgttttatcttccccagaggggaaaacctcattcttactccgcagttggagagggagtcatttgctgcactgagtcagggaagagatctggggacctaactgcttatttcatttgcaacgaatctatctgtttttatccccatctttgcatccctttctgaagacacttgggtcagccactcttgagatttttgagggtcctgaggtataaattgggttgcgactctgctttctccactgctagcttcagtctgtattcactgtatgtgattcacctgaggatttattaaaactgcagattggtttcatagatctgagctggagcctgagggtctatgtgaatagcagtctcctaggtgatgcttggaccacactttgtgtagatggggctcactcatttaccgtccatctgttcattttccagcctctgaaattttgtccttggagatttgtacattttttttaaagttatgaaaattttcaaacatacatacaaatagttagaacagccattaaccagtggtcgatcctgccccatctatactttcatccactcgacccccagcacacacactgcattatgttggcgcaaattccagacaacctatttcatctgtaaatattttagtatgtattattttaaatagtgagatttaaatataaccacacatattaatttgttagggctgccataacaaaccaccacaggctgggtggctgaaacaacagctctgggggctgaaagggtgagatcgaggtgtcccaggggcggtttctcctggggccttttgcagcctgtagatggctgtcttctcgctgtgccctcccacagccttttctctgtgtaccagcatccctagtatcatgtgtgtgtgtccaaattacctctttaaaggtcctatctccaaatatagtcacatttggaggtgctgggagttaaaggcttcaacatatgaatttggggggatataattcagcccatcataccataatttcccattgtcttatatatgtaattctttgttgccatgaattcagataaattctacacattgcacttagttgatatatcctaagtcttaatttttgtattgttgttgaaacaatttattgaagtaacaaattgtaatcctatagagcataccaccatgtggattttctttactgcatcctgtggggtcattaaataagttattgtcctctttcttgaacatcagtagttgaatctacaggtttggtcgggttctaattttttggcaagcccactttgtagatagcaaggtactcttcaatttccacctttcagtattagtattgatgatctttggctacctccatttagtacatcagaggtggcaaattgggcagtttccaaattttatcattccttattcactcatattagctagagtacttccaaaaaaagtaaacatcacctcacttactattctgtcaccaggtggtacagttagcacaggaacggcaggagaaaggcttcttggccagtacttaagtttaacaactagagactaggttctctagtgttcctcagcatcacaatgaggttttcttattcattttagaatctggtaaaacttgatttactgttatgttagtggagttatgagaaggaacatttgtttaaagaaggcactgttcattggaagttataatttatgtagccaatttcctgctattggagatttacattaattccaggtttttacttttatatttaatgctgtgagatgaatattctttaaaaataagttaaaacactcatttttagtgtataatttgaattttgaaaaatgtatatacttggaccccaatccagatgtagaacattttcatctctacagaacattgcctggttcacctttgccccagcctggcttcagatttctaccgatagtctctctggccatagggattcgtttttctgttgtgaatcccatataattgaaccacacactctataccctttattgctaggctctttttgttcggcatgtgatatggtttagatatgtgtcccctccaaatctcatgttaaaatgtgctctcccatgttggagatggggcctgttaggaggtatctggatcatgggggcagatccctcatgaacggcttggcaccgtccccttggtggtaagtgagctctccctatgagttcacgcaagagctggtcatttaaaagcatgtggggcctcccccttctctctggctcctgctctcgccatgtgagatgcctgttccccttttgccttccgccatggttgtaaacttcctgaggcctcaccagaagccgagcagatgccagcgccatgcttcctgtgtagcctgcagaactcttgagcccaataaacctctttataggccaggcacagtggctgacgcctgtaatcccagcactttgggaggctgaggtgggtggatcacttgaggtcaggaattcaagaccagctagccaacatggcaaaaccccgtctctactaaaaatacaaaaaaaaattagccgggcatggtggtacatgcctgtagtcccagctactcgggaggctgaggtaggagaatcgcacaaactcagaaggcagagatggcagtgagctgagatcacgccactgcactccagcctgggcaacagagcaagactctgtatcaccaacagaaatacctctttataaattaattacccagcctcaggtatttctgtatagcaacagaagaatggcctaacataacatgtttttgaggctttttttttgaggcttttccctgtgtggagcatatattaatttttgttgctgagaagtattccattgcctagatttactacaatttgtttatccattttcctgtggatggatatttgggatatttccactctggggccattggtgaataaagctcctacatatatttgtatacaagctttttttttttttttttttttttgtgaggcagattctcgctttgtcacccaggctggagtgcagtggcatgattgtggctcattgcaacctccacttcccgggttcaagcgattctccttcctcagcctcccaagtagctgggactacaggtgtctgccaccatgcccagctaacttttgtatttttagtagatatggggtttcaccagtttggccaggcttgtcttgaactcctgacctcaagtgatccacctgcctcagccttccaatgtgctgggattccaggcatgaaccaccgtgcccggcctctactgacaactgaatttcagacttctggcctcctgaatgtgagagattaaatttccgttgtttctttaagttgtgttagtctgttttgtgtcattataaagcatacctgagactgggtaatttataaagaaaagaggtttatttggctcatggttctacagactgtacaggaagcagggcaccagcatctgcttctgttgaggcctcaggaagcttccagtcatggtggaaggcagagggggagcaggtgtgtcacatggtgagacagggagcaatgggaagagaagggaagtcccagactctttttaaccagccagctctcttgtaaacaaataagagtgaggacttactcattactgtggggagggcaccaagtcattcatgagggatccacccccatgacccaaacacctcccactaggctccaccttcagcattggagatcacatttcaacatgagattcaaaggggacaaacatccaaataatatcatgagccattcagtttaaatttaccaccagtcaactgggcatggtagctcatgcttgtaattccagcaatttaggaggccaaggcaggaggaatgcttgaagccaggagtttgagaccaacctggacaacgaaacgagaccccatctctacaaataaaaaattttaaaaacttagccaagcatggtggcatgagcctgtggtcccagctacttgggaggctaaggcaggagcattacttaagcctgggagttcaagtttacagtgagctttgattgcaccacagcactccagcctgggcaacagagcaagattctcttaccaaaaaaaaaaagaaaaaattattgcctattataatttgttgtgacagccctaggaagctaatatatctacccaggattgcaaacgatttcttctgttttcttctagaaattttagttttatttctacatttagtcatatgatccttttttagtttatttttgtgtatggtgtaaggtaagagtgaaagttcattttcccccatatggatatccactttcagcaccatgagattgatcttggtttttcatagagacttcttatctagttagggacgtgaccttctattgtttgtttttatcatattagattttattaaatgctgcatctgcgtctcttcaggtgatcttatagtctttctcctttattctgttaatgtggtgaattacattgattgactttctaatgttaaaataagtttccattggccatgatgtattgatggattcagtttgctaataatttgttaacaatttctgcttccatgttcatgagggatgatgatctatattagttttcttgaaatgtctttggtatcaaggtaattctagtccttgtgaaatgagttgggaggtactctttaagtttggtattttttccctaaatgcttgatagaatccatcaatgaagacatctgagcctatattttctttgtgggtaggttttaaatacagaatcagtttctttaatagggatttttttttttttttttttttttttgagatggagtcttactgtgtcacccaggctggagtgcagtggcacaatctcggctcactgcaagctccgcctcctgggttcaagtgattctcctgcctcagtctctggagcagcagggactacaggccaagccaccatgcccggctaatttttgaatttttagtagagacgggggtttcaccatattggccaggatgggcttgaactcctgaccttaggtgatccgctggcctcagcctcccaaagtgctgggattacaggcatgagccaccacactgggccagtttctttaatagagctatttagggatcttttggacggagtttcggtagtgtctttccagaaatttgtttcatcatacaaatttatcgaaataaagttgttcaaaatagttccttattcttttaatgtttctaggtactcactttcccaattttggtaatttctttcttaatttggctagaggtttattaattttattggttctttttttcccctaaagaagcagttttgtatcgattttctttctgttgttttggggttgttgttgttgtttttgttttgattgatttcctttgcttatttatttatttgagacagggtcttcttctgtctcccaggctggagtgtagtggcacaatcttggctcaccacaacctccacctcctgggctcaagcgatcctcccacctcagcctcccaagtagctaggaccacaggtgcccaccaccacacccagctaagttttatactttttgatagagatgaggttttgccgtgttgcccaggctggtctcaaactcctgggatcaagtgatcctcctgcctcggcctctcaaagtgctgggattacaggcatgagccaccatgcctggccttatttttgtttgttttaatttcattgatttctgctttttttttaatcttccctttaacctactttgggtttaatttgcttttttccttaaagtttaaatttaggttattgaattgagcccttctttttgaaaacaggcaaatataagaatatcagaagagggccgggtgcagtggctcacacctgtaatcccagcactttgggaggccaaggtgggcagatcactttaagtcaggaattcgagactagcctggccaacatggtggaaaccccatctctactaagaataacaaaaattagccaggcatggtggtgtgtgcctgtaatccctgctacttagcaggctgaggcaggagaatcacttgagcccaagaggcggaggttacagtgaggcgagtttgtgccattgcactccagcctgggcaacaagagcgaaactccaactcaagcaaaacaaaacaaaaccaaaagaatatcagaaggaaaaatgcaaaagtatatgacttttacaaatatatgacaaattaaaattgaattttgagttttaccaatattcttacatttgtatcatggctttttaaaggtcttttttctgataatataaataatacatcctgttaaaaaaatttcaaaggatatagagaataatgaggaatggcattagtcaggaaaggccaaatcccattgacttaatgcaacaaaggtttatttcttgctcatactatacacccattgtgaatcgccaggggctttgcttcacatggtcactcaaggacccaggttgacagaggctccaccatcttgtaatgtaccatctggaatgcattgcctccccgcctccccagcccatgatggggaagacaacaatgaagggcaactcatctgcaataaaatgttttggcctggtagaccattaactgtagggatcaaagaacaaaaatcctccatgggcagaagcagagatgaagcaggcatgtgggtgagcactataattctacactgaaggagaaaaataaaaatcatctatcccctaccttgagataacctctgcttgctgtcttctgcctggcctcactggccttccttatcgccagccttatgtttgggttggtgggaattactcctgcttctggcagatcactgataattcttggttatgttctacctttgcgcctcttttgtcagattttatcagtgtataaataaaacaggaaaggacaaatcaagaatctctcactagttgtcttaataaggaaatttcatatttctttttaaaactttgctttagaatatctctggaaatatatacaaataactggttatagtggttgtatctagggagggaaactggctagacagcgctgggcagagtgggggtgttggagggaggattgggtggcacaggtaactttcactgtaatacacatctgtcacccaagttttgtatcatgtaaattatatcacctatttttaaaaataagtaaaataaaaacatttccatattttctatattgaatataactgtactgtgcaaatggatgaatgcaaaacattatcagagttgagtgactttttttttccactgaatttggacacatcaagcgaagaccacatttcaaatacaaactcttcaaagtttatatttaccttttggagggataaaatttcattatccaaatggatagtcaagtcacaatcctatggatatcagtaatcagtacagtcactgttacttgaatgtcgcttttttatttttttaattattattttttttttgagataactgtgtctcactctgttgctcaggctggagtgtagtggtgcaatctcggctcactgcaacctccccgtcctaggtccaagcgattctcctgctgcagcctcctgagtagctgggattacaggcgcccgccaccacgcctggctaatttttgtatttttagtagagatggggtttcagcatgttgaccaggctggtcttgaactcctggcctcaggcaatccgcctgcaccagcctcccaaagtgctgcgattacaggcatgagccaccacatgttggttttttagaaagctctttcacatacatacattgggtccttttctacatttccagtgagttaagccataattgtggtttactgaagaacgtgagctttgaagtcagacttgaggttgaactttagctccaacacttacgagtcatgggacctagggaaatgtacttattaaccacaagcctgttttcctcatggggaaaaattatatataccttttatgactgttgttaagaattagaaaaacagtatgtaaaacccctgataaggctatttctcccacaggcttgctccacttatcgggctcaccaaatacagctgcagtatgaattccatcttctacacaacagtaaaccagaatgttcatgttcacagcgttcatctcccatcctgttgtctaacgcacatggtttttttaaacttttctaagattgcatgagattctgcaacacaactgattataaaaacacttgaagtttttacctttttttttactttccaactctcgtgaatgtacagaggactttccagaagctacatgatgtgtgatatttcagctgatgaaatgtagatgtataggtaatcggtcagagtggtgggagaaactgttgggaaaggagcaggccttctgaaaggtcggaaggcttcaggggagaataagctgaacgcagctgttctctgaccttgaggcagagggcaaggagtaggtacaaggacgtgtaggagaatttatcttaaataggcttgttcacttgtgttgtccagaaacgacttttgatcatcagcgcgcatgactgctccctgaaaggaagaacaataatgttaattacccgcagactgtgtttgctccaggctttcggcattatgtctgtactgaataaaagcaagcagctccagctgttcgaggctgctctcttcttcagccattagtgccgggcagcccactagctgctgttacactgcatatctgtgtctgagtactcctttcttcagttgcttggccagggtctgtgggacagacccagcagctggtgccctgtgtgaggaacgctgcaatggatcgcgacggaaccctcgaaaacgaaggtgaagagactgcgcagtaagccagtaattggaattggagccctcttgggatttccaagttcgagggaattttcaagctagggtttcacattgggacaacacttactcaacagaaacagcatataaaagtattgaaacaactgcttaaagctggtggagcctcagtttgaggcccaattaagggacctaatgcaaactcttgttttccataacccatagttcccagaagaaggcacgttagacctagagctctgggagcaagtgggaagaaatcttaaacgacatcatgcacaagggcaatggggtcccagtaacatctttaacattatgggccttagttagggctgcttgggaggaagaaccatcatctaccttactgcctccgcctcctcccccagccccaccgttaccgggtaaaggtgccacagaggagacagaggttttccctgagccccctcccccaataaactggaaaaaggacaagggatacactacagttatgggaccctgtcttaagcaagcggcattagaaggggagctcttggtctgcctggtaatgcaagatcaacaaggcaatcgggtacatgaacccattactttcaacacttacaaagagataagaaaaagcattagagaaaatggagccgctagcccgtttatgaaaggattaattgaggccatggcagacaacttccatatgaccccatgggactggtcagtgctaactaaaacaactttagaggcaagtcaatacctcctctagagggcagaatttgatgaattatgtgcagcagaccgctttacgcaaagccagaacacgagctgtaactactgcgcctgtcaaacctggcactgcacacatctgtactcttcaatcaacaaaacctgatgcaaaaaaaagggggagatgtagatcagtcagagtggtgggagaaactgtagggaaaggagcaggccttctggaaggccggaaggctctacatagcttccgggggagaataagctgaaggcagctgttttctgaccttgaagagggcaaggagtaggtacaaggacgtgtaggggaatttatcttaaataggcttgttcacttgtgttgtccagaaaccgacctttgatcatccgcatgcattactgctccctgaaaggggggacagtaatgttaattacccacagactgtgtttgctccaggctttcggcattatgtctgtactgaataaaagcaagcagctccagctgttcaaggctgctctcttcttcggccactagtgctgggcagccccctagctgctgttacactgcttatctgtgtctgagtactcctttcatccgttgctcgactagggtctgtgggacagacccggcatagatgaaaattcagctgtctgctattaagccagacactaaagcaagttgtgaaatgtgaaacaatgccactctgctcactaaattattgtttggtaaaatatagtaatttttaccatattatttaaataacattttaaaaatgttattgatgttaacatgcatcaagggtcaaagggtcctgaaaccaaacactttggaggacagctgctttatcctgtggctgaaaactataaagcaagattcctttaagtaaatgtggtgtatgcatcaatctctccatctttggtgtgctttcaatccaagtatcccctttcttccttttgcaagaaagaaactaagaatgtaagcagttacttcctggcttcagtcccacaaaaagctacaatttttctaagcagtgatctggaaccagtttaactggactcttgctattaagatagctcttaatgatgtttcattttgttttctatctttcacacagagcttactcacatagcatattggtatatcaaaatgaaatgcaaggaaccaaaaataacataattgaaggcagtaaaagtgaaattaaataggaagatcatcagtcaaggaagacccactggagagtaagtatgcaagttgttaataattaattgggttacaaagggaaaaacagagactgggtcagtgaaacgaaatcatggtttgtttccctgaggccctgctaatacctccaaactgggccagatcgtaaagcaagataccttgaaaaggactttcatgttaacttttcaggttgcatatgagttcattcacaagtagtttaaagaatcatgcaggaaaaggaccagatcttgtaaatctcttgagtccctgtattttgtgaacatttttctagagaaaattcaggtagcttatcaaaggatttctgtcttgttcagggagttgttttaaaaaacaaaatattggaattttgaacacttatagtggtttacagggtaattggggtagagtacataaaattggtgtcgtctaagaaagctctgattggtttccatgatcgtggtattcaggaactatcgtaaattggccaaaatcttgttttccagtttcttcctttcgctttttattgcctcaagttgcctgtcttccccgctcttatttttcttctagctttatgattctcttacatgttccatgtcggacttgtcttctttattccagtcatcttctgaagaggttcttggttcctgccttggtggctgtagctgattctctttctcctctgtggaccttcctcatcccctaggagacacaagcgtcctcctccaggtcctcctcctccctacttttgtcatcttccaggtgcctccacctgtcaagagtcaatgatgaaacgggaacttggaaaacatcccttggatgttgcctacctggcttttctttttgcgacagagtgtcaatctggcacccaggctggaatgcagtggcatgacttggctcaccacagccttgacctcctgggcttaggtgatcctcccacctctgcctcccaagtagctggaactataggcccccaccaccacacccgagtaatttttgtattttttgtagagactaggtttcaccatgttgcccaggctggtcttgaacttctgagctcaagtgatctacccaccttggcctcccaatgtgctaggattacaggcatgagccacggcccccagcctgacttggctttccttacttaatttagaacaggagttataaaagttaaaatcatgtgagacagatgattctattcttttatcctaaagttacatttttgaaaaatgggtctttatgaatccacaaaatttcctcaccctcattttaaaccaacattggttgtttaaaactaagccttttttgttttcatttttggcacaagggggacttcatatggtcttactcatcttggcttctttatccaagcaacaccacttgtaagaccaatggcatttgtcaagttggcagctacatttctgtgcccttgtatatcaaatctggaatgcaacttttttggataagatcaaattaaactgtactatgtttaaatacaggggaaaaaaacttgagtgtgggaagtacttgtttgattgggtcttttatagttatgaaaatagattttgtattattgcctttacacatatatacgtttgtataagtagattatttgtataccttaataagttatcttatgacagatttatggccatgagagtaatggttcaatctgtcatcaaaactgatagccctctctcacagtgatttatttttattttaggttcaggggtacatgtgcaggtttgttataaactcatatcagggtggttttctgcacagattattttgtcacccaggtactaagtctagtacctaatagttattgtttctgcttctctccctcctcccaccctcctccctcaagtagaccccagtgtccactgtccccttctttgtgtccatgtgttctcatcatttagctcccacttataagtgaaaacatgcggtatttggttttctgttcctgcgttagtttgctaaggatgatggactccaactccatccatgttcctgtgaaagacatgatctcttgttttacgctgcatagtattccatggtatatatgtaccacattttctttatccaatctgtcactgacaggtatttgggttgattccatgtttttactattgtcacactgatttatcttcagacaaaattatttaatcatcagtgacctatttttaggcaaatttaattttttcagttttcagactcaaaactccatttttttccttaaagtttgggaaaaagaaagtatactactactgtattggtaacttgatatgtacctttttagccttttcctatgcatgtatttcttacatgacatgttgctgcataattttgtaacctgcatttcacttaacatactgtgaaaatttatcatgacattatttttttaacatgtaccaaattcacaaggcttaaaatttaacaaatgaaggtagagtgaaaagtatgaaaactaagtcttcctcctatcctgagaaacatttttaatggctgcatatcataaagatgaccatatccagggtgagcatccctaatccaaaatctggaatctgaaatgctctaaaatccaaaactttctgagcactgacctgatgctcaaatgaaagtgtgggtttttggattagggatgcattcaagatccaaaacacttctggttccaagcatttctgataagggatactcaacctgtgtttcgtttctttcttgtttttttcttttttcgagacagggtcttgctctgtcacccaggctggagtgcagtggcacaatcatggctcactgcagccttgacctcccaggctcaagcgatcctctcacctcagcctcttgagtggctggaaccacaggtgtgcatcaccatgcccaggtaatttttttttttttttggtagaggcagctccctatgttgctcaggctggtctccaactcctgggctcaagccatcctcctgccttggcctctcaaaatgctgggatttcaggcaagagccaccacacccagccaacctgtgttgttttgaaccaatctccagttgttcacatttgtgattgactgggtttgttgttcttgtcatttttggggttttttttttttttggtttttgtttttgtttttttgctatttataaatactgcgattgagtagtattgtagaaataagttaagtttgggtcaactgattttttttaaggatgtgtttcttgaatctcctacctttcctttcagtcctttcctgattcttcttctgacttctttcatcatctttttcctgcttccaaaatgtatgtatcactgaagcctcaactcctattcctttgcctttacctaccgcttcctaatgttctcatgtatccatactgagtccctgttccttccctgtattctcgtctctccacatgccatacctgaaagatcatatccagaagataaacacttttctttctttcctttacctatgttctcattatttttagctgaaaccacctgttttcagagcttcaggaaaagacttaatctgaaggatcctgcagctaaaaagctttgaaaactgtgttaaggggccccataagcatcgcttctaaacttcactgacaaaagggactggggtcatgctgtctggagtcagagtgaggtggggttaaaagctctatgtggttgttttgcatattactatcaagcttctattttaggcatgagttttggccctggtagataaaaccatttctctatctaaaagttattaaaacctgtacttatatatagaagttagtaatttatatataacattttggtttaaaaatctctgagttctggaccatctgggtctcaaaaaaatgaccagagtatacacattaattttgttctgtattctattaagtattatgtgacatataattcttattcatatatttatttggggaaatgattgaattaggcttttaagaatagtggtgcttgctttgtaaagtttcaaaataggtaacattaaggttttcttttcactttttttgcagggacagaaaatgaagcagtgttttatcatgtgtatttcagcaggtcttcttgaaatttaactaaaaatatgactgctctctcttcagagaactgctcttttcagtaccagttacgtcaaacaaaccagcccctagatgttaactatctgctattcttgatcatacttgggaaaatattattaaatatccttacactaggaatgagaagaaaaaacacctgtcaaaattttatggaatatttttgcatttcactagcattcgttgatcttttacttttggtaaacatttccattatattgtatttcagggattttgtacttttaagcattaggttcactaaataccacatctgcctatttactcaaattatttcctttacttatggctttttgcattatccagttttcctgacagcttgtatagattattgcctgaatttctctaaaacaaccaagctttcatttaagtgtcaaaaattattttatttctttacagtaattttaatttggatttcagtccttgcttatgttttgggagacccagccatctaccaaagcctgaaggcacagaatgcttattctcgtcactgtcctttctatgtcagcattcagagttactggctgtcatttttcatggtgatgattttatttgtagctttcataacctgttgggaagaagttactactttggtacaggctatcaggataacttcctatatgaatgaaactatcttatattttcctttttcatcccactccagttatactgtgagatctaaaaaaatattcttatccaagctcattgtctgttttctcagtacctggttaccatttgtactacttcaggtaatcattgttttacttaaagttcagattccagcatatattgagatgaatattccctggttatactttgtcaatagttttctcattgctacagtgtattggtttaattgtcacaagcttaatttaaaagacattggattacctttggatccatttgtcaactggaagtgctgcttcattccacttacaattcctaatcttgagcaaattgaaaagcctatatcaataatgatttgttaatattattaattaaaagttacagctgtcataagatcataattttatgaacagaaagaactcaggacatattaaaaaataaactgaactaaaacaacttttgccccctgactgatagcatttcagaatgtgtcttttgaagggctatgataccagttattaaatagtgttttattttaaaaacaaaataattccaagaagtttttatagttattcagggacactatattacaaatattactttgttattaacacaaaaagtgataagagttaacatttggctatactgatgtttgtgttactcaaaaaaactactggatgcaaactgttatgtaaatctgagatttcactgacaactttaagatatcaacctaaacatttttattaaatgttcaaatgaaagcaagaaagtaaaaa

SEQ ID NO: 560 - DNA, 108834 bp, Homo sapiens
gggcccgcgagtccggggtcgccgcagcccgggaggagtgtctggtctccggcctgcctgtgctgtccccgcgccctgtccactggactcccgagacccttggaacccaggtaacccggggcgggactccccgccgcgcgccgcctccccacctcccggtccacgcgcacccgccctccgcggcagccccagccgccctgcgcccgtggagcccgttgagcctgggtggccgctccgagggcgggtctgggaaagtttgtgccggggcggccctgatccggcggcggcgcggctcggccactttcaccgcacgcggggccggtgtgaaggtggggcggccgccgccgtgcagaaggctctctgctgcaatcgagggcggtgaggggagctgttgccttctcgcaccttttctctcactctccagggcgtttgcgccgcttatccttcctccaccgcccccctcccgccgcccccactttaataaaacccttggattggggctgcacagttggcgatttctttacacctgtgcttcccgcctcctgagcccagatgtgagcctgggctgagcaggaccgtgtgggtgaggggcggcccactgcctgcgggggtcgtcccggccctgttgaagtgggtgcccagctacagggagttccccctgctctgtcattggcctccccccggccacagcccccagctgggcatctcctggctcccctagcacttcccaagtcctagtcggatgagcccaggagagggggtggaccccggcccagcagaacaagaactcaggagcccggtaactcttatccgtgagcagaaccggcttcctcccgcttaggttgggaggagggctcagcttagtgggagtcgggggtgacaactgccccttcccacgcagagccatagagaagagatggggagaggtcaggggatctgagaagagctagcagccaaaaagggacacatccctgatttcatttgaacctaacaaaccaatggcgagtagatattaacacatgggcagatgagaagacaaggaggcccaacaaagctcagccatttgctggagaaactggtgggcttttctccaccactgagtggcgggtttcccaccgcatccttccagagctgcatggtcgcttctgcattcttgcagtgcccttgactcagcagaggtttgtttcttttaccccactccccacccccctaggttctgcctgtgaaagaggttcaggggagagggcacctccaagcagacacaaactccagtcagtaaggtcctccaagagccagccagagccttgctaagctcccagaactgcaggagggcagggacctgctttgttccctgcagggacctgctttgttccctgccgtagcaatagtacctggcacacggaaggtgctctgcgagaatggaatgattagcctgcaacagcaaagcttcttttccaactgccttatctctgcccttggcaagcagaaagggcactctgaaaagttggatcagaaaggtgtccagccccaccactgagatcccttggcacccttacccacgtggggcaacattttccccttacaccaagagtacatccttaatcccgtatgcttttctttctttctctttctttctttctttccttctttctttctttctttctttctttctttctttctttctttctttctttctttctttcttttctttctttctttcattctttctcttccttcctccctccctctctctctctctttctttctttctttctttctttctttctttctttctttctttcattctttctcttccttcctccctccctctctctctctctttctttctttctttccttctttccttccttccttccttccttcctttagttcgttttctttctttctttctttctttctttctttctttctttctttctttctttcttccttccttccttccttcctttctctctctctctctctctctctctttctttccttctttctttctttctttctttctttctttctttctttctttctttctttctttctttctttcttctttctttttgactgagtcttgctctattacccaggctagagtgcaagggcgagatctcagctaactgcaacctccgcctcccgggttcaagcaattctcttgcctcagcctcccgagtagctgggattacaggcgcctgccaccaaacacagctaatttttgcatttttagtagagacagggtttcaccatgttggccaggttggtctcgaactgctaacatcagatgacccacccgggttggcctcccaaagtgctgggattgcaggcgtgagccactgcacccagcccccatgtgcttttccagagagacagaggactttcactttacccttgtcccgccaaggagaggccgaggctggtgggttccatgccaagcttggctctaccctagactgaggcagagcaactttgtccctttacgtagaattcttatgcatccctctgggggtaagaattggaattggaattatttggaaactttaatcttcattgtctcctctctctccttaccactccatggggcagctatgtattgagggaagagaaggtgcttttctgggcctcaatttcctcatctgtaaaatgagagcaacagaccctgtgtggttttaggagatagtaagtggttccaaaggactctgtgggctgcaaatcaaactgtaagagcggattgttattttctcatgtgtattagcctggcctccctggttggcggtaagtcctttctcagcatcttggcatccctcattcatcctgagtacacagaaggtttacaagacatgttttcaaaaatgatccgtacaggaagagaaaaattgtgaattcataagaaatggggggagatttttttttttttttttttttttttttttttttttttagcacagtgttaggagtcaagaatggtggcaggaaactgggcagggccatgcgtgagtacagggacagctctcaggggtggtgggggtggtaggtttgtgcatgggcttgagccccagtctgtctctcagcggcttcctccaggaaacaaaactgaccaactccgggttggtcagatatatatatttgagacagggtgttgctctgtctcaacagagcaggctgcagtgcagtagcatgatctcagctcactgcaacctccgcctcccggtctcgagctatcttcctcacctcagcctccttagtagctgggactataggcatgcaccaccgtgcccagctaatttttgtattttttgtagaggtggggtctcactatgttgcccaggctgctctcgaactcctgagttcaagcgatctgtctgcctctacctcccaaagtgctgggattacaggtgtgatccaccatgcccagccagaaatggggactttcaaattcctctccctccctccccatgtaaggggaggggacaccccaccatgcaggggaggatcagtaggagggaaggaagggtctgagagcccctgtagttggaggtggccagtgtcttgttcatcgaaggccagggcaaagtgagggatgtagaagagtcactggcagtgccctgaggatgctgcccaccttgctttgaagaaatccacccctcagtcaggacttttggggccctgccaggaaccctgtgtgacccctggactcctcagcagacccaggtgtctgcctttgacttgaggacaggccagcacacctggggttagtcagttctgtttcctggaggaagccgctgagagactgactggggctcaagcccgtgaacaaacccaccatccccaccacccctgagagctgtccctgtactcacgcatggccctgcccagtttcctgccaccattcttgactcctaacaaggatgcagcagagtaagagctttagacccagagtctctaagctggactaatccttagcagccatgtccccctgcttcttctttgcttcattttccatggctcacatccccttctgatggcctatagatttcactccttaatcttgtttgccatctgtcctccctgttagaatagcagctctgtgagggcaaagccttttgtctctctcgttccatggtctctcccaagagatcagagtgtagtaggtgctcagttaacacgtgctgagtagatgaacacatccaatgcaccatttctcagtatacagatggggagactgagacccagaggcgaggagtgactcttggaggcagagctggagcttttcctaattagactcaagttaattcaaatttgggtctctgtctcccactttgaattaccttggttgctaggggtgcttaagaggcccttggcaagaaccttcaggccagctgcctccagagttacccaaaggggcagctcccagactgaatggacagccgccacatgaggcgattggtgagttccaggaaggagtcatccccaccagacctccatcctcaaagaaaacctcccagggttgctctcccaaggcagccaattcctctgctagtgagttctctcttggtgaaaatagtgccctcttcaggcagccttttaaaattccccagtgcaattaaaaaaaaaaaaagcacatccaatcaatcaatcaatcaatcagtcagtcaatcaattctccagtgcactggagaactaaggaagtccaaagccaggctccaggcagccgtgggagaaggagtggcattcccatggacttgggctagggataaccgaccagtctgagaaatgcagccagaggcccagggaagccttggggttctgaggcctcacttgggaatctggcaagagagcctagaggccacagtgctcagcacgccccccacagaggagcagatcttgtgcaggcctctacattccatccatggggagctttggcttttttccccaagcccagctgttgaccccaaacatctttttccatcgtcattgtggtttgccaaattcagggttagaatgcacctgaaccttggagctgggggaaggactccagaaattaggccttgaaggatatgtaggagttttcaagcttgttggaaaaattagggaggaaggagacaggcaggtgagggagcagtgataatgctttgcctgaagaaacaaatctgtaatggggccttcttctgtgactgaggccattgtaggcccttccctacccccccatccttgtccccaaccaccttcgatgggctccctgctcctgaagagggtgaggccctgacctaagacagagcttcatgcactactgccctggccttctctttattaccactgttactacaagtttgctgactttcagccacagtggatggaaaagtacgcctgttgcaacatgacgtgagtcagttgttcataaataatgggattgcaccgtcagctctgatgccctggtgtctggcccacagttggagacatggtgttggctccttggagaaaagggtaagggtgactctagacatcagtttgaaattatgcaggatggcagtgaggatccagcaggtgcgagagctacaatcatttttggcatctaggaaaaaagatagtgcccccaaatcagtgatccaaggtttaattctcacccatgccctgtcctccgatccaggttttgccttacacagtcttcctctcttctgaccttgacctcagccaggaccacccccagcatgctatggacttaaggggtgagttttgcccaagcctcagacagggtcattctgcctggacacaccacagccccttcagacagtcttcctctgattatctgggaaccctttgaccaagatggtcaggttcaccttggtgggattcatttggagcctgccagagacacagagaccaactatgatagcttctagaccccagagtcccaaattcagccactccactagcttgccacttgttttggagttgatcactgcactcctgggagctgaagactagtgtggctggtagagagccttggattctaattctgacattatctaatgcatagtgtgactttgatcctgtcacttcctctgcctcagtttcctcttctgtacggcttggattcatcatggtgtctcaacctcagcactattgactttcggtaccggataattctgtgtttgtggtgggcggtggagaggggggatgtgctgtgcattgtgggaagttagcagtagccctggcttctacccagcagacactgcaccatcacatccccttcccttcctggcaaccaaaactgtctccagacattgccaaatgtcctctcggggacactccatctctggttgagacccctgggatcaatgatctatgaagaccctcccaacggtcatcctcaggacaggggagaccatgttctctttccagcccctgtttcatgaatgtggactgggtgtgaatgaagactcaacacgtggggtgtgcaaggacttatgggtggaggggccccttggacctcatgctgagagccaaggccagttctcttcgccttccagaccttgggttacataagtcggggtgggtggggcgaggctcggagtgagggggagagaggcctgtggttcgggcccgcacactaaggtcagtggccttccagtgcggggcagcgtggtgagtaatcatctattcatgccctaggactcagcattccacccactttcccctctcacgctgccctgggaggggacacaggaagtgaatcagcccacccaccaagcagaggagggagagagggtggagtgtgggtgttgttagacgcaagggcacgcctgcgccggcctaccctgggttttattttgtttattcctcccaagttagctgtttattaacttcgtccacggaaacccccttctgaccttgtcgcttaatggaagggcagacgatctttggcagggggaggggtttgttgatgaatattagaagtaaatcactgtctctgggaataacagactgtgaggtttgggatagtactaacccagacctattgctctgggggattcattccttcattgaagaaactctgctctggactgtgggctagatgtggggcaggagaagggaatgagatatagtgcctgcctgcagaacccctcagtctcagagggaagacatggctgtcaggctgtccctgcagggtactgggaatgtacatggaatgcatggagtggggtgtgggcagcaccacccagctgtgttgcggggaattgggggtgggcagctggggcaacacatgtgcttggggaggtggagggaatgttcaggcagcttcccgagaggaagaggtggaatttttgttgtgttattttgttgttaccttttgttattgcagtaaaacatacaaaacatttaaccttttttttttaccatttaacctttaacctttaccatttaacctttaaccatttaaaatttaccatttaacctttttttttttttttttgatacggagtctcgatctgttgcccaggctggagtgcaacggcaccatctcggctcaccgcaacctctgcctcctgggttcaagcaattctcctgcctcaacctcccgagtagctgggattacaggcgcacaccaccactaatttttgtatttttagtagagacaaggtttcaccatgttggccaggatggtctcaatctcttgacctcgtgatctgcccacctcggcctcccaaagtgctgggattacaggtgtgagccaccgccccccgcccatttaaccattttttaagtctgcaactcattgtcattaagtacattcacattgttgtgcaaccatcaccaccatccatctccatacctttttatcatctcccagatgaaactctgtacccagtaaacaataatttcccatttcccctcccctggccccttgcaaccaccatcatcctttccgtctttttatgaacttgagtactctagatacctcctgtaagtggaatcatgctgcacttgtctttttgtgactggctaatttcacttagcatagtgtcttcacttagcataatttcacttagcatagtgtcttcaatttcatccatgttgtggcatgtgacagaatttccttcttttttaaggctgcataatattccattacatatacatcatattttttttttttttgagagatagtctcgctctgtcacccaggctggagtgcagtggcacgatctcggcttgttgcaccctccacctcccgttatataccacattttgtttatcatttgtttctgacacttcagttgcttcaccttttgtctgctgtgaataatgttgctatgaacatggaaatgcaaatatctgtttgtgtccctgctctcacttcctttggatgcgtgcccagaagtggagtttctgggtcatatggtgcttctatgtttaagtttcggaggaaccatcatagtattaaggaagacgtgtttgaattaggttttaaggatgagcgtggaatctctggacacctcagagggaaggggaggggagaggagggaaggaaaaagcccaggctgcaggaagaaagtggtgctgaggtgttcgtgcctggggctggagatgaggccctgagggtaggaggggctggggaagagtatggaaggtcttgcacctttcatcccccacaaggctgaggaacttgggctctgccctgtggacagtgagaagtgtcgaaggagttttcatcaggaagtgagacaggctgatggtcatcttagaaggacatagttgggagggatgtcccaggtggactgagagggaaagaggcttcaggcaagaagaccaagtgagagaaagctgggggaccctgtggctgtcggtggggtggtagagggagcaagtctgaagggtgctgtgccgcacaagggtgcccaggattctggtttgttggctgggttgatggtggtgcaggcacctgggtaagttcactggaggagcagctgacttgacaagatgaggagtggataaacttgggcctggtggctttaaggggcccacagaaccacctggagatgaacttagagacgaggcattgacaagtgtgaaaaggcattgcagagctagttgctgagttcaaggtgagaagccagtcaagggccagggcaaggactgccatcagatgacctggagggccctgcggagttgaaagccaggacacagggtggcctctgctcagtgtggctcaatccctgccctgggcatgtcatatcaatccacacattctcactgccaagctcgaggctgcatgcttggtttgggcactgtgggtagagacccagagatcaacatgacctagtgactttaattcatttattcatcccataaagctcagagaatggaatctggccaatacctttgcacagctaaagattgaatgtctgcaggagaaatggagtgtgttatggaaatgtatcatggggacatgacaggctagagcaggatttctcaccttggccctgctgacatattgggccagataattctttgtcgtgtgggactgtcctgtgcactgcaggatgtatagcagcatccctggcttctatgcaacagatgccagtagccacacacaccccctccctgcttgtgacaaccaaaaatatctccaaacattgccaaatgtccactggggagcaaaaccatccccaatgagatccattggtctaagggtcaaaaaggtttctttgaggtagttatgttaatctgaattccagaagatagataagaattagttaggatacagcaggggtggagagtggaggagagtattcaaggcacaggttccagcaagtgcaaaggccctgaggtgagagacagcatggaggcagcagtgaggaacctggtgtagcttcctcactgaatgaatggggaaggctttgattaggcaagcagtggtgaaggtgggagagaagggtcagattctagggatcttccagagggaacactctaggttctgatgaccgaaagggtttggacatgagagtgctaaggaaatcccccaggtgcagagaatgaaaccaactagaagctggtgaattacatttggagcatgctgggttggagatacctgggagacagcaggtggggtcctgagctcagaagagaggcctggttggagctacacagttggaagctacatgcatacaggtgatgagagaagccatggggtggatgggacagccccgggagagcctgcagactgagaagtggagcatggagaggagggcctggcaggaagcagcaggagctccaacatttagagatggagaacgagttccaagagagatagtggaggaccgtatggagaatggtgctgtggaggcccatggaagagtgctccaggcgcagggcatgggccacggtgaagcctgtggagcacgagtaagtgcatgaggactgagaagtgcctggggattttgaagtgctatgaggaggaaccagacttagatggttgaggaatgggcagcaggtgggaagagaggcagctggcagacagtttttccaaaaatgtgtcagtagacgtgaggagagagtgaagaagccagaaagggaagtgggtttaggatctcactgggaagagttttcatcctcctatctcccccgatctccctgtcccctccctcctcagaggcaatgttaccagttccacgcatgtgttagaaaagacgtatacagattatttcccccggatggtggcacatgcatgcactctgcccctgcgtcttaatttttccacctagctacctactgtgaggtttctccatatcagtacctagaaagctgcttcttggccaggtgcggtggttcatgcctgtaatcccagcactttgggaggccaaggtggctgatcacctgaggtcaggagtttgagaccagcctggacaacaaggtgaaatgccatctctacaaaaatacaaaaattagccaggcatgatggtaggtgcctgtaatctcagctacttgggaggctgaggtgggagaatcacttgaacccaggaggtggaggtcacagtgagctgagatcgctccactgcactccagcctgggtgacagagtgagactccatattaaaaaaaaaacaaaaaaaacaaaacgaaacaacaacaacaacaaaagaaagctgcttctttcttgcttatggatgtcacataacttatttaactaatctgttttttggacatggaggcagttttgagccttttgccaccacaaatgatttcccacagaatccccttgtacttcagtcattttgcaaatgtaggtggctataggtaggataaagtcctagaagtggaattggtggttcatgggtatgtgcgtttatatttggaaagatatcggcaatgtgctgtccatagagtttgtaagaatgtacccacctaccagcagtggatgagaatactcatttaccacaccctccaacagagagtgttaccaaacacaccaatatttgccaatctggaagacaaaaaatgatttattgatatagtttaacctgcatttttgaataaagttaaatatattattacagatataaaagtcatttgaatttcctcttctgtgaactgtctattcatatgttttatcaattttatttgaagttgttcttatcagaactttttcttattagaggaatcagagggaatcttgaagtattggagaaactagtcttttgtctggaatatacattatacgtttttcccttcctcatttggtcaacaatttattattattattattattgctgttactgctgttttttaagaattatgagtgttggccaggcgcggtggctcatgcctgtaatcccagcactttgggaggccaaggcgggtggatcatgaggtcaggagatcaagaccatcctggctaacacggtgaaaccccgtctctactaaaaatacaaaaaaattagccgggtgtggtggcgggcgcctgtagtcccagctactcgggaggctgaggcaggagaatggtgtgaacccgggaggcggagcttgcagtgagccgagatcgcgccactgcactccagcctgggcaacagagcaagactccgtcgcaaaaaataaaaaaaaaaaaaaaaaaaagaataatgagtgttgatggaagagattcactagagaggggatctctgatatggaggtccctgaggaagcatttaggtgagttccagaatggaccagggcttgtccttaggcaggaagggagatacctcgctgtcatgacaagtagaagggagggaagacggagctgtgtgccaggaattggatggctacacgttgaaagagtgaaggaaatcgtgagttcatctagggaaggggctgtgttcacgagatggcagaagttagagggatgagagagttcaccgatgtagcaagagaatgattggactgatgaagcctggaacctgagttagatgagggaagtgagtggatggtgttctgacgtttgcttagattttgtatttgtttgtgtggcatttgttagtcacagggcaagcaatcagcccaagttgtttccatctcccctgcaacttaaaatccatgctctgaatcacttccttatctaactgggatgcaccctgccaatctttccctgcccttagtcgcccaggctgaggtaccaaatgagttgggacagcctctacgccccagtgcccacaggggttatttaaactagccattcctaacctgctcaacctgccctgctgtgcttttcccgttgaaacccaataaaggatctgaccgaggcctcacgctcactgaccaaagcctggtgattcccctgcagccacacactgggtttggtgtggcccctcctcttgggaaatgtgggtgatacattcttctttcagcaacattgcctctgttatcactcagttgcctccatcaattaaaatcctgcaggtacaattgagaccacaaaggaccctcaaacaggaatagaatgtaagggtcagtaaactgcaggcccagtgaggctccagagccatcagagcatgagtggttaaataagcaagctctccgggaagaattcctggaggaagtgggctggggagatggattctgaagaatggagatgaggagatgcgttgtagtgggaaaggcaagagcaaactgcggggtgcaggggagtgtgtgggtgtgtttgggtgtccgggaggacagcaatcagaactgaaagaggctggaggaaaatctgcaatgaggaggttaatctgatgttgtatagaggaggcaggggcgagagggtccaagaggtagggtggagcctgcagatgctttttgaaaacaggatttttctttccaagaatgatttgattttgtggtaactccttctgggggctcagagtggggcttgaaggtgcctatgatgaaggacctagatgtgtgttccaaccttgcattaggtccaacttgactgttgctatacagtaaaccccctaccctgctaccttttggttaccacattaacaaaaccccattcctggctgagctcaatcatctgactttgcccttcaaccctggcaaaagtcatcctcttctctctcttctgcttgtcacagcagcgggggaacttcgctcccatctgaagtgagcctcagccctcttggtgccttcttcctccccatgaaaaccccccttctcctgtccagtccccccgtcccccaggatcagctgcccatacctggtgactgcttctgactttccaggggcatttgacttgagaaataaaaaaaagaaactggaaaaccgaaaagtctttaaagcatgaagacttgagcaatactggttggatggtgggtgatggcattgcagtactgaagcctgaggccctgttccacactgcctcaaatcacagagactcttttttgggggtggggatttgcctgttctaataatgctggcctaggtcacagtcctatgtgctataaatcagtaaatccatgggaagttcacgaacacatgcacctattgggcgattcctcatgctaccttgggatttctcttgtatcgttgcttacacagttatttacctttttgagagtggaatttgtggggaagtcatctcatattcagcaagtgcttgcctagttctcacgaaccctgaactgggtcaggtggcatggatcttaaacctttgttgtatgtgttttacctccccagtaaagaccctgtcacgactccctgatatgccctatagtccccattgccaatgcagagaataagggaacccagccaggcacagtgtctcatgcccgtaaaatccaaacactttcagaggccaaggagggaggatcccctgagctgaagcgtttgagaccagcctgggcaacatagtgagacccccatttttacaaaattttaaaaattagctgggcatggtggtgtgtgcctgtagttccagctactcaagggggctgaggtggaaggatcacttgggcccagggagctgaagctgcagtgagctgtgattgcaccactgcactccagcctgggcaacagagtgagactctgtctcaaaaacagcggcaacaacaaccaaataaataaataaataaataaagggaacctagatgggctgtggttggcagagaagatttcttgaaaaaaggaagagctcgagcagacagtatgtctagaaaaggtaggaaaggggaaggaagagaaaaggaagtccaccagggaggccccatttccggcactctacagagccaggtgttcccgagaggaggttgagtgtcagcccttcagggtggccagtggatggcgactggtcaccctggggtgggggggtgacaggtgagcaggtgagccgcctaagaaggaaagggacaggaggcaatggagttcctgccaacagtgagggtggggatctgtgaatgttgccccctctctgccagctggggagtcctgggggggctgcaagctggatgggcagggtggggagtgggtggactcagggaccttgcctttctgtgagggactgaagttccttcacagccgcctccccaagcgcccagggaacaactgttctcccagatcagggctcactaatgcctcctgcctggaatcctggcttgctgaaagggagtgatagggagcagggagttctgagaggagggcttccgtttctgaaatagaggatgccaattgttcatttcttcgatgtctttggtacacgtcctctctagaacctgactaatcattttttacaaattgtaagtggaaaaaaaaaaaggaaattgtgtgcaggaggatgaaaactttggcttaagcgtgggcttaaccaagcaggaagggaaagtggctggcccagctgcccttctccctcctgtccctcctagtctggtttggtttaatcttacctttgtcctagaggcagttccagatgcccagttgctggaacattacttctgggtgtagcttaacaagaccatggcctctggacccgcgatcagctcgctgtgtggtcctgagcagccacccaacatctctgggccttggattcctacctggcctttcttctggatgcatcatttttgcctttaggtatctggaccattcccccccatggatgataaagtctttgcttcacaccctcaggattaccttaaaggcctgaaaagaacagaggaggagtctgaggaggtgaattccagccgtgctcttgcaggctggctgggcagtgtgctggggaggagagggagcctctggctgggcctcctccaccgggcctggtgtgctgggaacaccccgcattgtcccaaggcctcagatttgactttcaaagggaaaacagctctcctgataaaggtgggtcttgttctatgatatatggctttgttccagtgtcctgcaggtatgagaagaacagaggctgcaccgggtctctagggggttagacgactcctgctttgggggagctgaagggtttcatgtgcctgggctgtgtctgattgtgccttcagtatcgctgtctgggcgcctgctggtgccgggcactctattaaatgtgatcttacggaccactctggaggagcagtgcaggagtggtcgtctctattctctcagcctgggatgaggagactgaagggtgtgcagcttgtgcagaatcccttgggcttcccaggggacagctcaagtcagatttgaaccacgtcttaggagtccttgcccagagctcctttccccacagactgtttatggtgggccttcacacgactgcaactgcgttctctgcccttccactccgccccttctgctctcatgtgtcccctgcagcatcaatggttgccaattattgaggaaatgaattcactttgttcagggaggaagatcggggtctttgtctgaataataaaagaaaagaaaagtttgctctaataattccagtgaatccccacagcacctcccctctccccaaagcatcagcatgtcttcgcgttttccagcatccttgaagacccaagggaatgggtctcgaatggggaaatctccagtctcaagtcacaggggctggcccctgactcacactgcagaggtgaccacttttccaccttcttacccagccttaccttcttaccacagccagccctgggtgacattcctgtgccaagaaatgcaaggacctatctccaagtgtgtttcaccttgactggcactttccacctcacatacccagggacacgagtttgggagaggtgtctaaactacagaagttatttcctttcttctcacttttcatatagaggccctgctttttctccctgggcaaagtgaatcatttcccatgacaagcaatggcagttggagctctgggggcagggactacctgggtttagggacaactgtagtaagaatcttcccctccagcccctccactgtcatgcacttgccagtctcatgccgcttccttccccttgggctcggggcagtccttgggtcaggagctcaaggccagcctggagcctcagaggtggtcctgggcagtgaagcctcggggaaggcggagggcttactatttacaccttctgagcttgggctgcacgttcttgggggctgatttagatgaactgttattctcattattcatagggttttttatttttttatttttttgaaacagagtctccctctgttgccaggttgcagtgcaatggtgtgaccttggctcactgcaacctctgcctcctgggttcaagtgattctcaagcctcagtctccagaatagctggaattataggcgtgctccaccacacccggctagtttttgtattttcagtagagccggggttttgccatgttggctaggctgatctggagctcctgaccacaggtgatccacctgccttggcctcccaaggttctgggattacaggcatgagccaccgtgcccggccataaggttttaaataatgcattttgcctcagccctttaaaaaaaaaagcctgtgcttaataatgctacaataatgacgttgtgtcacatttcagccacggggctcttaatccaccactgcattcaaatattgtgaaatgtgttacttacgatattgggttagcgggaaaaataatgtcctagcaagaaggaaggagaaatacattttccgttttatcttgtagcctgggacaggccagagaaggcatgtccctggtcataagttagaatgacagttgctctttttgagtcccggctatgcatcaagggcttacacatggggcttacacttactaatgcttgaaacaccccaaagaggtagttgctctggggattataaaagtgtccacctgaagagatgctgtgaaaattaagtggggtgtaaaatgcccataaggggtttatttatttatttattttgagatggagtcttgctctgtcccccaggctgcgtgcagtggtgggattttggctcactgcaacacctgcctcctgggtttaagcaattctcctgcctcagtctgccaagtagctgggattacaggcacacgccactaggcctgggtaatttttgtatttttagtagagatggggtttcaccatgttggccaggctggtctggaactcttgacctcaggtgatctgcccgcctcagcccccaaagtgctgggattacaggcgtgagccactgcacccagtccacaaggggtttagaatagattgagtgctcaatagtggtgtttcaaatcaaactcatcatctccatttcacaagggaggaaagtgaggcccagaggggcttcgggactcaaagcctgggtgagctgactctggagcccaaatgccatacacaccagggggagtggttggacattatgcaggcgggggcatccacccaggctccctcaccccatctaagctccccactggctgtggggccacttacaagacatgccctttcccatctgtgccctgcagccttctctgacccctagtaccctccagtctctgctgaggtctgggcccatgccggtccacccccctacccaggtccatgcagccttcttccctctgccagttcacatctccctggctgcttggctgccctgaccattttcccctcacctgtgaggtgtgctctttgggtaatgattacgtgaaatggctcacctacagctttatagatttacaatccccccagtcccagtgggtgaagctcagagttaatgattgctagaaaagcttcccacaaatgcaaatcatctagggaggtgcagcagctccctggacgctccctcactggcctggcattgaaatgcacccggggtgctatgtcttggctttctccacgtgcccaccctcctttccccttctccccatgctgtgctcccacctcttgcctctctgagctcagcaccagcaggcctccctacttgccgtctgccagtctgcctccctgccttgtgcctctgctgtctctggggacatcgttcccttctctgccaaagcaagtcctcagcctctttggtatccacctaaagcactgcctccaccaggagcctgccctgactgcaccaccatccttgcgcagggtttcttctctgaacttcgccgagccaccaggcagatcttttctgagtgctatcccatacatcgggcaatgtttcgttgcgaggactcagcagtgggcaaggcaggagccctgccatccagaggggcattggtgtgctctgggagcacccagccagcctgagctgcagcaggggctcagaggagaagaggggtgcactggaggctgatgaagtggggctcgggctgggacagacggtgtggtggaattgcctaggcaggcaagaaatgcatctcgaagcagagggggcagcttgttcgaagcacaaggcaggatttggtgtcagacattatgcagccatgtcatgtttgagacacctgtttaacacccaggtggaggcaggtgatccctcagagatgtctgtctccctctctcctgttacctgctcgtggtccactgggtatgtcttgtctcctcagaaagatggggttctctttgagggcagccaacatttctgacactctgcccagctcagaccccagcactgagcacgcactcactgcagagatgtgggattgaatttaaactcacctccgtcatccattctgcctccttcttcttggggcacctgcttttcaccttgtcctgctagtacagtagtcccccttatctgcaagggaggtagttcaagaccccagtggatgcctgaaaccacagatagtactaaacctggtatatactatgttttttcctgtatatacatacctatggtaaagagtaagttataaattagtaaggattaaccaccataataataaaacagaacaattattataatatgttataataaaagttatacgatgccaggtgcagtggctcacgcctgtaatcccagcactttgggaggccgaggcaggtggatcaccacctaaggtcgggtgtttgagaccagcctggccaacatggggacaccctgtctctaataaaaatacaaaagttagctaggcgtggtagggggcgcctttaatcccaggtacctgggaggctgaggcatgagaaaagcttgaacccaggaggcggaggttgcagtgagccaagattgtgccactgcactccagcctgggcgacagagcgagactccatttcaaaaaatatatatataaatatatacatatatatatatatatatatatatatatatatatatatatatatatatatatatgaatgtggtctctccctctcccactctctcaaaatatcctgttgcactatatatacctatttttggaccaccgttgactgcaggtaactgaaaccccaaaaactgaagccatggataagggggactgctctatgggtccccagctccttgtacttctgcttgcttttggttgtgagtgtcttgtctcccaaacggattctaggccatgtgacccgaacgagcacagctcagagcagttgttccctccttgggctgagcatgggactcaccactggagcctgataacagggtgatccccaggcagcaccccaagggaccctgattcagaaggttcgagataggcccaccttggcggctctgggttctgacaagccaggtttctttggaaacacagctgggcttgggacttgctgccagagaggtttccaggctcctgtctctaccctagctttaaccagtcctcacctcttcccagggttagaaacttagactcgatttggacatttttggagcagggagctcagtgcccatggagcagcatgcgggtgcttgcctctgtgggttgagctgaatgaagcctgtctcctggaagctcttgtctgggggtcttggttctgctctcagcggttgcatggcctcctccaggttcccagcctgctgcccctggacatgtgaaggcactcaccctcgccccacgtcttctctgggtctccttcctttccttcctctgcggtctggtctggcttccacaggctggcagctttatctcagacttcaagtttctgatcagattagaagcttgagagcagggtggagataggatctcgccttcccccgcagccagagccttccccgttggggtgaggggaacccaacagtcagggcctggagtcaccttccatcagcctggcaggggcttcgccctttcccagccttgggggaggaccccgcctgctgcacccaccctggaggccaactagctgggtagcatagagccagaacgatcccaggctggcgtttggcaccctggtgctagatctacagggctcagcagcagactggctccaggtgggctctgctcctcttacctgggaccagctttacagtcactgacgtgggtccccttcccctcccctgacccttggtgagctggatttaaatgagctggggttcggcctgggcattagtattttttaactttctgggtggtttggatgtccattcagagaggtgcctagcatccccttccagctctgacaatgcatggaaatagttattgcatgctcgggtaagatcaccagggccgataatatgcatatcatatattgctgaaatcagtatttgtattttacaaaaaggtatttaaaaaatgtaaaacaggaaacccaaatatttaataattttaaatataaaaatgctttagaataccaataaacattgacttagaaaaatacacattctcattctagtctatgttagcagataaaataaacaaaaatgaaatattcaaaacattaaaacctatccacctcaaaacctcaaaattcagtcatggaaagttcaagaagggatactatttgatcccttttaaagcagaaatttaaaatcaaaggatgttggcaatatcattatgtcacaagtatgctttttttccctgtaaaattttctagaaaaagcttttcctgactctaccctagttggggaatagtgagaagatatatttgtgtgatatcttcgaatattttccgccgacaaggccttttggctttttttcagagactgccgtcttttatttataaggagccacaatttttgtttctaaagcatttccgatttgcctttgagttctttggttttatcttgttcagatggagattctgatgcacgcttcctgtatcagtttcaaaactgtcatgttgatatcccacatgttaggaaagtctgtgaatagagtggtaattattcttgcaacagagttttgctttgtctataggcatgcaacatctgagtaggactcaaaagacatatttcatatttcagggttttttctgacattgttattctctcattttcaaagcatatacaaagattgagagattagtagattaacttccatgctggctccagcaattatcaactcatggccgttttttatctatactcttacccagtcccctggatccccaccagattttgttacagccggtctgagacgtcatatcgttttatctgcaattacttcagtatacatctccaaaggaaaatggcccaataaaacacataaccacagtactattactgtaccttaagaattgataattcctcattatcataaaagagcaaatgttgacattttcccagttgtctcctacattttgttttacaattagtttgtttgagatttcctatgtttaaacttttgaaataaatatctttggaccaaacagatatacaattttggcactgaagtgcagttttcgtgaacacagcgtggcaaccaccaggtagaagatgccagacaaccaggccagaccctgcctctagggctcagagtgcagtggacagcagaagtcattcagtggctcagcaaacattcattcattgaacaggaacactggacagtgttcctgggctgggcaccacgggcacagcaatgaccaagacaagctgggtctgtcttgacctgatggaaaccaggacactggaatctaactgaagtttgcaaatgaaatgatagatacccttgtactggaacccagaagtgagtggaagctaattttaccctagaaagcattatagagcaggtgacatttgcgtttagccataacaaaaggaagaattttgtcaagaagactggtggcttatgcctgtaatcccagcacttttggaggccaaggtgggagggtcacttgagaccagcctgggcaacatagtgagaccccatttctaaaaaaaaaaaaaaaaaaaattaaaaactagccagggccgggtgcagtggctcatgtctgtaatcccagcactttgggaggctgagacaggcagatcacctgaggtcaggagttcgagaccagcctggccatccatggctaacatggtgaaaccctgtctctactaaaaatacaaaaatcagctgggcgcggtagcgggcacctgtaatcccagctacttaggaggataagacaggaggcagaggttgcagtgagccgagatcgcaccactgcactccagcctggatgacagagggagaccccgtctcaaaaaaaccaaaaataaaaaacaagaaaaaaacctagctaggtactgtggcgtgtgcgtgtggtccaagctactcaggagggaggctgtggtaagaggatcatttcagcctaggaggtcgaggctgcagtgagctgtgtttgtaccactgcactccaggctgggtgacagagtgagaccctgtctcaaaaaaaaaaaaaaaaaaagaagaagaaggagaagaggaagaagaagaagaagaagaagaagaagaagaagaagaagaagaagaagaagaagaagaagaagaagaagaagaagaagagggagaagaagaagacgaggaagaagaagaagaggaagaggaagaagaagaagaagaagaagaagaggaagaagaagaggaattatttcatcaagaagagaagatggagtaagagatgtctcatccagtgcaaataacgagcacaaagagcgcatgggggtgggaagttcctggtgcactaaggaccgagatgacaggagggcaggcatatggcaaggctggtgggaggtggggctgggggactgcggagggcttgaggatatgctaaggagtggggttttccaggacctactgctggggactgcgctattttcttgtttgaacataaagtgtggaacatggggcaggagaagagaaccttgcaggaacaatgaggaggatttggatttccaagcccttcctggagccctctgtccactaggccaagagtctgcctggatctccatgagtctccagggataacacagaggctggcgcacagtgagtgcttgatataggtctactagcagatggcctctgccatgctcccagtgagagtgctcccaccagcctccaccttcacctatggtggtgagggagggatccccctctttatgccttcggctcagggaaatggggtggcttttccaaatgcatgagctgttaggctttaggacttggtccccagctcccctgaacggccagtggtgctcctgggccagaggcaggatgggggcacatagagtaaggctcacctgtgaccttctcaggtgaatgtacaagcaaatgccagcatttgcaacccatgggctggctgacacaattaatccttttaagacctgccaagagttagaggactcattcatttattttcttctaatagcgttgcgttaaatgaaagaaagaaaaagaaaaaagaatatacatgctcattgtgggcaaaccctgttgttacagaaaaggagaaagagtaaagcaaatccctagatttgctgatctaccactaccatccagagagagccacaatgaacagccttctaaatcttcttctgttcataaatacaaagcagttaaatgtagcaccattttatatagacagtattacgagatttaggctgttctataacctgctttttttcacttaacaacttgtcatgacaccgttacctgtcagttaccacagatctgtaccatttttaatagccccacggtacagttttgcatggatgtggccgtaagttacccaccagttctgttgccagaaatgtggattgttttccatttttctctgcaatgtgctagggaatatcattcagctttttcagatatgtaataatcgtctagcagtaaatatttagaatagctgggatagctagggcaaaaaaaaaaaaaaagaaaaaagaaaaaaggctcagtacactcagagtcctaagccaagctgggaggtcaccatggcaaccccctgccatcctcacacagggagtgcccatttgccacggctccagcccaggaggtgggtcagagctggaggagaaacagtctgttttcaagcagttttataaaccaagggcagaaggcacaggagagagcattaatgcagacctgagacagcttaaaatgcagtggtgataatagctctttattgagtccttgtcatctggtagataccatgggttttcatcctcaccagagccgttgaaacttttatgatcctcattcaagtgattagaaactcagaaactaaggaatctgtccaagggcacacagtaaatgatggagccagggtttgaaattaggctgcattcactcttcagcattctccttgccaccacaattggagtggccagcctctgtctcatcaccatccctgaggctcaggttctcttttcccagtcccactagagcattcattcccaccccattcatatgcagcgcacaccaattcttcatctggcctctgttttctgggctccactctggcctcctgccactccataccctgcgtacttccgtgctgaactacagataggtcctcgaatggcacgccctcttcctacctccatggccctgtcctgctataccctcagctctcccccatagctgtggcactcctattgactcttcaagacttatcccaagtttcatttcttttttttttttttttctgaggtagagtcttgctctgttgcccaggctggagtgcagtggggcaatctcagcacattacaatctcttcctcccaggctcaagtgattctcctgcttcagcctcccaaatagctgggactgcaggtgcccgccaccatgcccggctaatttttgtatttttagtagagacagggttttgccatgttggccaggctggtcttgaactcctgacctcaggtgatccacccagctcagcctcccagtgtgctgggcttacaggcgtgagccaccgcgcctggccccaagcttcatttcttcaagaagtctcccctgactccctagcataatgccctcctctgtgttcccctagaggcataaccactattttttaagcactgtctatccccaggcagctgcatcgcccttataggtcaggcagccacagcaccctggaatgtttgtttctcttgcagagggaacgagcacccacctgggcctgcagccaggtgcacagtgagtctgcaataaccactgctttactattagatgtgccgcgtggcaattgttagtgcagatctacactagaatgtgagctcttaagggatagaactgttgtgtctgcttcttcatccccatatctttcctaccatagctttggacatatagtaggtattcaggaaatgtgtgctgaatgaatgaatgaatgaatgaatgaatgaatgaatgaatgatcaagcatattcctgcccactctccacttctgctaccagccccagggcaggtgcaaactcggaactacattaacccaagcagcctaccaagttcgctgcctctcacctggctggttcctgaccactccccaaacacgtgacccctcctgtctccttaagcctcatctacctctccacccaccgcagtttctacgcacagccatctgcccgggaaactaaggttctgggtgaacgcttatcatcacctctaccacatcatcccatgaacctggctttttcttctcccttgggctcccctgtctgtgttcctctccttggtgggacctcaggtattccctggggctttgaaagccacttttctctccctctgaaatgtatctgtagcctcaacttctcctccaagatgcagtcacatttttttttaactgcaaatacatgcaaatcaaactcaacttgtctgaaaactgtcctggttttcctcactttcttcatcatttcccattgatgtcgtcattttccagtgcctgggaaatggtgctccaaagacgccagccaaatttgcctgtttctctgtgatcagacacctgacttttatcaccagggctccaaactccccaaagctcccagccaagcctggcaggagtagtgaggcctcagcaaacctaagggtgagtatccatgtgaagaagctgtgtttcctgggctgcatcccgttctttccatgtgcagattcagcccagggctgttagatcttcagatttatcaaaagaaactgggagcggggtttttatgttgacagctctttgtctttttttttttttttttgagataggctctcactctgttgcacagtctggagtgcaatggcataatcttggctcactgcaatctctgcctcccaggttcaagcaattctccctgcctcagactcctgattagctgagattacaggtgcccgccaccacatctgtctaatttttgtatttttagtagagacggggttttgccatgttggccaggctggtctcaaactcctgacctcaggtgatctgcctgcctcggcctcccaaagtgctgggattacaggcgtgagccaccgcacctggccttttgttttcttaatagactttatgttttagagcagatgtaggtttatagaaaaattgtgcagaaggtaatttccattccctccctccccacccccgttattaacatcttgcgttagtgtgtatgatgaacaaacatggatgcattgttattaactattgtccctcctttacattaggcctcatgctttatgttgtgcattctatggactttgacaaatgcttaatgtcatgtttccaccattacagtatcatgctgggttttttttttagatgaggttttgctctgttgcctgggcttgagtgcagtggcagtaacatggctcactgcaacctcgacctcaggctcatgtgattctcctgcctcagcctccctagtagctggggctacaggcatgcaccaccacacttggctaatttctttattattattattattatttgtagagatggagtctcactatgttgcccaggctggtcttgaactcctggactcaagtgatcttcccgcctcagcctcccaaagtgcttacaggtgtgagccactgcgcccaccacatgcggattgttttgtaaacactttaggcatcagaagtctctgctttctacgctctttcatcctagtgtgcccctccttctcattgtagctaccccacagtattcagctctttccccctctctccactccttagagcttcctgtccctacacatggtcatcctttcatttgtgtcatctttctaccaaactctaagctcctggaggcatttggaggtttaatttagaagtctcagtctccccagtgcctagggtgcttttgagattcactaacattcacctgcaggcatattaagcaagtgcctgcaggtgtgttggctctgaggcttccaggaagatgcttttaggtcctgttgacaacagagaaagtgagagcatgtggcaagggatgaagacttgggcacatctccagtggcagtggctgcagggaggagagaggaggttttccagcaagaacagttttagagagaggagaggtgaggggacaaacagctttgagtgggaggatgcttgaatccttgggagctgccccatagaatgcccaagttgggatctcagactcccagggccctcacctaccagagtcaagcgattctcctgcctcagcctcccgagtagttgggattacaggctcctgccaccacacccggctaatttttttgtatttttagtagagacagggtttcaccatgttggccaggctggtctcaaattcctgacctcaggtgatctgccagcctcagcctcccaaagtgctgggattacaggtgtgagccaccacacccagccaagtctcttcttctataatgaaaatagatccaggtcctgtcattcaggaatctaaattgtggctaccaaaatgacaacatttgaaaggatcagagaatgatatacatcaagctaataatcataatgacctttgattgagctgtttgctgccagccacgctctatgcaaagaagcttatgtacattatttcatttaatcttcatgcagtttataagctaaggatagagaggctgagaaggctaagaccaaggctgagaaagttaagcaacatgttcaagggcaccagttagtgaatagagaagccaggtctgaaagccagatcagtgtgaccctgaagtctggtctcagccatttccctacagctagagggttcagggaggaggagggcagcaggagaggagtcgctggagcccgtgtccctcctggaggaggctgactgtgggctgggcccgaaaggctgccagggaagtggccagctagagggtatttgaggcttgggggcaggcctgcagcctggccagcctggaaagactcccagggagttgctcgggatgggggtgggggtggccattattccagcctgtgcttaccctgagtggcccacagtgacatggatggcaacccctccttagggccctgccaggttcccgttgcctttccctctgtcacccatccccctgggtctgcagatgagatccaggcccattgcctctggtgtgggctggttgccttgggtgcggactttacccaagtcagagggcaaggccagtgcagcctgcagagccgcttctccctggatcacacctgctgagggaatgcctctcccagccaccggaccagtttccagtttccagggtggggcagccaggcagaaacaggtttctgtgaagtgacactccattcactgactggtagcatgactctgtcccaccacttggagccacgccaacaaatcctgccctggaatggggattccgtctggacgccaggttaccctgggaatgcggcttcgcccttgttcaccaggcactgcaaggggctggtggttctgaacctttcctggctcacagatgccactgaaactgttgaaactttgttgaaagccatagcccttgtccccagtgacacacacacatatacactcactcacacataatttaacctataatttgataaactccctgaggtccatccatggattttcatgggcctcaggttaaaaacccccatccttgaatatagagagtagattggtggttatcggaggctgggaaggaggtgggggatgaaggggagaaaaaaaagaatataaatgtattgacaatcactgaactagatggtaaattatatatgtatattttacctaaatttattttttctttctttttttttttttttttttttttttggagagagagccttgctctgtcacctcgctctgtctgattgttaccagtgcagtggtgcaatcttggctcactgcaacctctgcctcccaggttcaagcaattcttgtgcctcagtttcctgagtggctgggactacaggtgtatgccaccacacccggctaatattttgtattttagtagagacagggtttcatcatgttgtccaggctggtcttgaactcctgagctcaggcaatctgcctgccttggcctcccaaggtgctaggagtataggaatgaaccactgcaaacagcctcaattttcggtttttaaatcatcctaaaagtttttgccgctgatggctcactctcctgaatgtgttctttgtagtaatagtagccataatagtagccatagtggtaaataccactggcattgattcagggttttgtagctaataaagtttgttcacatctattattatttcattttagctcccccatagccctggccaggtaggtattaatgtttttatttcacagatgacaaaaatgaaagtcatttggaacaagcccagccaaattcatacctaggagatggtagagagaagacctgaccttggtcacccaaaatcccaagctctatgtgcctctccccatcttcatagaacattctccaagcttaggcagtccagggtacttgttacaatacaccagggaatgttagtgaaaccacctgtgcaaaattatgactgagaccgtgaaagagatctaacttaactgactccatcttgcttctaaccccaagctgtctttgttcattcctgggcataggctgaacttactttgggagaaactgggtttgtagtttatggtttaaacaaaaatggtaacagctctttcccaaaggagacctccttcttgcctggggactagattaacattagccacagaattagaaattatggtttaggagtcatgcagttggaggccacaagattctgaccctccctagactgctcttaagatcagtgcttgggatattttgcagaccctgcactcggtggatcagcaggcaccacccagatcaatgaactggctcctctgatcttgtggccccctcccaggaactgagtcagtgcaagaagacaacttcgactccctatgatttcatccctgaccagcactcctggctcattggttacccaccccccaaccaccaaccaagttatccttaaaaactctgctccaggaatgcttggggagacttatttgagtaatgataaaactccagtctcccacacagcaggctctgcgtgaattactctttctctattgcaattcccctgtcttgatgaatcggctttgtctaggcagcaggcaaggtgaaccccttgggcacttacaaatttggtggctcatccaggattgcccttgtggctacctgcccatggttcggtggccccactccagtgatggatccagaagccagcccaagcagccacctagttctcttggactaggggctgactcagggactctctgtactggtggggcactgccaacccagtgtacatcgatctaattgcaatggagaaatagtcctggggcgacgttccttaactgtagccctatcacagggtgtctgtatagcctatgatggggtgtctgtctgtagccccattgtggggtgtctggattggtgagtaacctaggtgctgccaatgcctccttccttctcgccactggttctgtagccctatggtgtggtgtctgtaactccaccatggggtgtcttgtgtctgtagccccattgcagggtgtctgttcagctcctgcggggtctcagttggctctttctaactagtaagaagagtcttggtttgagagacttatcctcaatctggaagatttcgaggcagtttctcagacggagaataggaggatagtttggaagggatactcttggagttcttggttagggatctgatttagaaggccttctgtctatctcgtctttgtgtgtgtctgtgtatgtggaagggatctcaggagaggttgctaatggaagtccagcaggtctaactcagagatccctccttatttgcctggttacatttggtaagccctaaagaaagctcaacaggcctgtctctcggggtgactatctggtcttcgccttgcccagagactccattgtgaattaccatttggaggtcatccctcccctccccacctggagtggatcagaaacagggagcaacgggaaaaagtttgagctttaccagacttatattgggtgctgaatgaggtgactaatgtctgttctgttgtgtatattttgctgggatggaaaatgttaatttggttccccatgcaacctgttggttagcatcttgcaaattgagaatcttgcctatggttccataaaacagtaaagtggtttattttttctcttgtaagtggcttgaacctcacagctatagcacaagcgagcagggtcatgagaagccactctttcttctggaagctgcagagaaagagaacccagaaaccgggtatgccagcaaaaagggtgagaaattcttaccagcgaagattctggtctctctttctctgtctgggtaaaacagtaaactattggtctcctctgcaagggtttgattaatagaaaaaaggatttgtgagactagtcttaggcggtagcaaatctgctgtactttgtgctaagaatttgtttttctttgttctgtaatggagagaggggtatcacaggatagaatgtgggtttaggacccctataagcccgcttttcaagccagcttggcaggctggtcagttacaaaccttgctacaggttcctgaaaccaatactggatgaaatttctctgtcttgctttgtgtccttaagagcttaaccttttgaccatgtggggatactttctcttggtttctgccatccagaggacaggaattttggggttcatgtcatagtcctaaaaattttttcttgagcagttaaaagcctgtgcaagcttgaaattggcttctctaggctccttctggggagaggaatagaaactgctcaatgctgtaactcagtagctgaggctttgctttttgacaatggcagcctgagttttagtcttggcttctggaatgattcctttctgagttttatttatgaaactttgccatttattgaggttccccaccccacccccaccccggccaacccatggatagcttctgatttcctgtcttgagttttcctttctctaaactaccctgggggagattctaaatcttgtaaaaaaaaaaaaaaaaaaaaaaaaaagaaacggcttaccttctccttgagacatgaatgtgtccatggttaagttataaccttagctaaaacttattaatttcatgtgggaagttaactgtggtagaatttaaaagccaaaaatactggtcgcttagtgttaaagtcgggtaataaaaaatttaaaaggatattttttaaagagcgctatggttaaaagtcagcttaattaaaagtggataaacaagcaataggtatatttaaaaggcctttatgttttcctctttttgggacttgtttttttcctgggaaaaggttttttcttctcagttgactgaattatttttttccatttttttttatcttgccaatcttaatacacacatgagaggccctaagataacttctggtagcctgggactccttgggaaaaacagaggaggcaccacgaaccccgttttggaaaaaaggctctgttttcctcatgaaaccccaggaattaaaagcggatagatccctctcagaatcaaaggctctgttctgtttttcactgtgttatctgacagttttgatttttaggggtatcagaaattacttattatgagagagctttggtgtgtaataactaggtaggaaatatactttagggagtggctaatagtagttgtggagggatacttgactctgcacacttggatcagagacgcatgctctcggccacctggaagataaggaggcgtccccaccccgcactgggagatgagactcctgtgagagatgggccgattacaaaatgggctgattggctttgggttgccttgaatggaatgcagggtagaagcattgcacggtcttctcccacagtatttccctcctgttggggatccaggatccagtataaaatggcacccttaattttggggatctgtctttgccttcagctgcttatttgctgcttatttggctctagaaatgcatgctttcccggccctgctcctccaagggctccaccctaaagccagtcacccaattaagaaactggcaaatgaaaaattttacaagtgctgaatcttctgtctgtctgtattcatatgtgttgtgtgtgtgtgtgtgtgagatgtttgtataaaagagctctggttaattggcttagaaatataagcatttaaatcaaatattttatcagaaaaatagaaaccgtaatacctttttgttcacatgactttagtagtcttttggaaataaagacggtttttttgttttttctttgagatggagtctcactctctcaccagactggaggcagtggcgcagtcttggctcactgcaacctccacctcccgggttcaagtgattctcctgcctcagcctcccaagttgctggggctacaggcgcccgccaccacgccgggctaatttttttgtatttttagtagagatggggtttcaccatgttagccaggatggtctcgagctcttgacctcgtgatccacccacctcggccttccaaagtgctgggataacaggcatgagccactgcacccgacctgggaaataaagacagttttaaagattattggtaaaataaaatgtcttgaaaatgtagacatttggtctaaaataaggtcaggtatcagatttgctaaatgctttaaggtcaaactgtttctttgacttttgagaattgttcaatttccctactttggagcattagatgataggtaaggcctggggacatgtggagagccatgcccgccagctatgctaagagtcagaccttatcttcatttctgattgatgtcctaggctccaccccagtacataattaaaatcgcttacttaccaggtttttcactaaaaataaaagttgctaagatttaacattgtaatatgtagttgagaccactggagaatgcgttttacatactaggtgtgtagggaatgtgtttttggtaaaagatgatcagaaggcatgggaatatggcttttgttaaagggaatgtaattttgtctacttcagagggttttaaagattgtcttaacccaaaagagtaatggaacaaaactgaaggtttaagcaaagggaaaggggtttgtaaagggttgatcttgtaacaaattctgtgggtataaacaagttggctaagatttaaaagaaattggctgggcgcggtggctcacgcctgtaatcccagcattttgggaggctgaggagtggggatcccttgaggtcaggaattcaagaccagcctggccaacatggtgaaaccccaactctactgaaaaaatacaaaaattagccgggcctgtggcaggtgcctgtaatcccagctactcagaaggctgaggcaggagaatcgtttgaacccaggaggtggaggttgtagtgagtcaagattgtgctcaagcatgggcaacagagtgagaccatgtctcaaaaaaaaaaagatttaaaagaaattttagcttttttttttttttttgaaatggagttttgctcttgttgcccaggctggagtgcaatggcatgatctcggctcaccacaacctctgcctcctgggttcaagtgattctcctgcctcagctgcccaagtagctgggattacaggcatgaaccaccacacctggctaattttttatttgtagtagagaaggggtttctccatgttggtcaggctggtctcgaactccccacctcaggtgatctgcccgcctcggcctcccaaagtgctaggattacaggtgtgagccaccgcatccagtttttttttttttttttttttttttgagacagagtctcactctgtcgcccaggctggtgtgcagtggcacgatcttggctcactgcaacctctgcctcccaggttcaagccattctccttacctcagcctcccgagtagctgggattacagatgcatgccacccttaggttaaagcattaaaatcatactgatgtggggccagaatctgggtctgtgtgtccgaataacagggttttcttagaaaactgatctgctgttggatggaaatttgtaaagagttctaaaaagtttataaaaatcttaccttatggtcagactaattacaactggatcgagatataaaattttatttaaaaaactagctttaacattaaagatgcactaatgcaagcctgaaatttggttttctcttttgaagacgatttttatgtaatgttaaaagataatgaaagtggttttgttttctcctttgggtaagtggcaggaaaaaaaaggaggagagagagaaaggagacagattcaggtggcttcatgctatcttcattgagtcttgtttggaaagctaagtctcctctatcagagtaaaggctttcttttttaaaaaaattttttggagttatcattttggctaagtgaatgacttatggtgacctgggattctattttgtgatatccagtgttttaaacctttgatatttgacaaactttccaaaatcaaattataaattatatctctttctaacctaatattttagatatcaggtcctctaaagtccaaaaatgacatttggcttatttgacataaaaatcatacaggaagcattgtcaagtatgaaatggtgtttggctttctttgggctatatttgtgtaaatgtattattggcatatgttccaaaattatgtaaaactcctaaaattctaatatgactttgtatatgttatcagtaataattataattatgttaaatggctgtgtgccacaggtaacaaatctctttgtcgatcgtgtctttaactgtggctaccctataatgtttttgtcatccacagatgattgttgtcttattttggtcctcctaaaagttggttttataatcagctgtaaaatttaacaggtgctcttaaatgcagatttctgcttaataactctggagattgtgactttagaatagacagaaaactttcaaaagaaagagagaatggtgtttggttttctttggactgtatttgtataaatatgttattagtatgtgttccaaaagttatgggaaacttctataattctgatatgatttagtgtacattattaataattataattgttatgtaaaattgttgtatgccacagaagtggaagaaccaaaattcctagtcaattgtagctttaatagtggctatagacttttgtcatccacagacattttgtcttgctttggtccttttcaaaaggcaatttataatcagatacaagactctgagtgcaggtctcagataactttaaaaattgtactattggaatagaggaaaaaaggaaacttctaggactctcgtggagagctggtatgttaaacattgctaatccttttgttttcagagtaaagattacttatttctttagagctatttgcaagctttaacaagtgagtaaaatatactcctgtggaaaattttggagcatatttgtttctctctacctgattgctctagaatttggaaaccatttgtgtgtattctcaatttatggcagtatagttaattacataagtgcaataagaatctgttttcttttgtcacaggacaccattggagaaactgggcattttaccaaggatttgactggaatggcatgcttcctttaaagatgaaagttgacttttagagccaattaaagccctttggggaatctggcctcataccttgtccacacagagttcctgtacaaggttcctgacctgtggtaagtaaagaacgtcactttctaacaggcccaggaaccccaggttatcttgggacctcaagaggagaggattttgctcaactcataggtatttgagggtacaaacccatggctgggctcagcttttaaaaacttttatctgagattcttcatggaacagagttctatcaaagccaatttaaaaagcctaagtgaaaaataattattcttgctgcactttatgcaaatcatcaggccaagtagagtaagactaaaattcattttgtaaactgtaaatcagttctatcatgacttgcttttaaaaaaatggggactgaaatcccagcactttgggaggcccaggtgggtggattgcttgaggttgggagttcaagaccagcctggacaacatggtgaaaccctgtctctattaaaaaaatacaaaaattagccaggtgtagtggtgtgcacctgtggtcccagttacttgggaagctgaggcacgagaattgcttgaacccaggaggcagaggctgcagcgagctgagattacaccactgcactccagcctgggtgacagagcaagactctgtctcaaaacaaacaaacaaacaaaaaaaccagaaacaacaacaacaacaaaaagattgttgtgggaggactaaggctaccaggtacccagacggatgcatgtctggacaagaagcccctcctaatgtaactgcccaaggggttcaccttgtccactgcctagtggcaaaattatgctccaaaagaaaactatagtatactgttgttagctgttcttgaggttttttcctgcagtttagactaaattctaaattccttgtgggttagaagtccccaagctaatgctttcaaatctttgcttttaaaattgggaattgtactcctaattgtagaactcgtaatgtaccttatagtaggctgttcacttaaacactgtagtaaaactatagatgagagcactaatgtttttcccacacaagccttggaagccaagccaggcctgcatgagtacactcagacagttagaaagcggttccactcttctcaccttggggttcactcccattcccacaatgtcccttgtcagcaggaagaagccagagcgattgacagccttctcctatcttcatagcctacaccttgagattaaggtgttacaaaatccaaagggagggattgagaccgcctttgcaaaattatgactgagacaatcaaagagatcgaacttaactgactccatcttgcttctaacctccaagctgtctttttcatttctgggcataggctgatctaactctgggagaaacttactttgtagtttatagtttaaacaaaaatggtaacaaccctttcccaaagcagacctccttcttgcctggggactagactaacattagccaaaggattagaaattatgatttaggaatcttgcagttggaggcctcaagattctgaccctccctagactgctcctgagatcagtgcttgggatattttgcagaccctgcacttgatggatcagcaggcaccgctcagatcagtaatttgtctcctctgatcttgtgggccccacccaggaactgagtcagcgcaagaagacaggttcgactccctatgatttcatccctgaccagtcaccactcctggcccactggctacaccccccaccccgccaccaagttatccttaaaaactctgctcctcaaatgctcagggagactgatttgagtaataataaaactccggtctcctgcacagttggctctgtgtgaattactctttctctgttacaattcccctgtcttgacgaattggctctgtctaggcgtggacaaggtgaaccccttgggcagttacattaggaggggcttcttgtccagacatgcatccgtctgggtacctggcggccttagtccccccacaacaatctttttgttgttgttgttgtttctgggtctttttggtttcgtttttgtttttgagacagagtcttgttctgtcacccaggctggagtacagtggtgcaatctcagctcactgcagcctctgcctcccaggttcaagcaattctcatgcctcagcttcccaagtaactgggaccacaggtgcacaccaccatgcctggcaatttttgtattttttattacagacagggtttcaccatgttgtccaggctgatcttgaactcctgacctcaagtgatccactcacctgggcctcccaaagtgctgggattacaggcatgagccattgagcccggcccctccacaatctttagaatgtaccagagcatgtgtgactctaggtggaaaaaaatccatggctcttcgtaatcaatacaggtgacctgtgacattaacaccttttttttgggggacggagttttgctcttgttgcccaggctggagtgcaatggcacaatcttggctcaccgcaacctctgcctcccgggttcaagcgattcttctacctcagcctcctgagtagctgggattacaggcatgtgccaccacgcccggctaattttgtatttgtggtagagatggggtttctccatgttggtcaggctggtctcaaacttccgacctcaggtgatctgcccgccttggactcccaaagtgctgggattacaggcatgagccaccgtgcccggcctcacattaacacctttttttcaagcttttttgtttatggcttttagtaagcaataccttttgtcataatctagtatacacatacagtcatacataacatagcaagcaatatctataaacatatgtaacaaacatcataaaacagtacttacctttactctgcaatacactgatattttctgtctattcttttccatacgattctatctttaaatgttaatcatgactcactaaatagatttcacgatccattgagaggttgtgacctgcagtttggaaagcactgtgtgagcagacataatcatggctttaatgaatggcaaactacttgggagttgtttataatcttgctgaggtgggcatttgacccatgctgcaaggaggctgaagttcaggcacgtgtcattcagctgatgagtgacctcagctttcccccagctccctgccctgtgagttggccgttttcttcccatggtggattcaggcattggcatggcggggtgagcttctggtccttccaactctaggacccatgcacatgttcccactgttcgttagagaccttccttatttttgactttgccaggccctcactgagtgacctcaagcaagtcatttcctatctgaggttctcagatataaaataggaagaagggtggattgaactagtctgcgcttctcacaatagtgggggaggcagtttgcagcaacaggatgtgtataatatgtattttttttctggaagatttggagaaaataaatttttgtattaaaacaactataaattatggagcagactacaaaaagcacgtgctttttaatgatacttttttattgtggtaaaatatacgtaacataaaatttatcatgctaagcacttaaaaatgtgtaattcgttggtattgagtacattcacattgctgtgcacctatgaccaccatccatctccacgacttcttcatcttcccaaatagaaactacgtatcccttaaacactaattccccatcccctctacccgcccccggcccccctgccagactgtctttacgtaaatgtctctaaaatttgcctattccaggcatgtcatctcaatggaatcatacaatatttgtccctttgtgtctggcttatttgacttaatgttttcaagcctcacccatgttaaaacatgtattagaattctattcctttttttttttttttttttaaaaaatagggtcttgctctgttgcccaggctggagtgcagtggtgtgatcacagctcactgtggccttgttctcctgagctcaagtagtccccccacctcagcctccagagtagctgagattacaggcatgaaccatcacattgggccttttattctttcttaaggctgagtaatatcctgtagtatagatataccacattttgtttatccattcatctgctgaagagcatttgggctttcaccttttggtcattgtgagtaatgctgctatgaaaattggtttagaaatacctgcttcaggccgtcgcacctgtaatcccagtacttcgggaggccaaggtgggtggatcacttgagctcaggagtttgagaccagcctggacaatatagggaggactcatctctacaaaaaatacaaaaattagatggtgtggtggcatgtgtctgtggtcccagatacttaggaggctgaggtgggaggatcacttaatcccaggaggtcaagtctgcagtgaggcactccagcctggacaacagagtgagaccctgtctcaaaaaaaaaaaaaaaactgtttcagcccctttcacttcttttgggtatatagatagaagtgaaattgctggattatatggtaattctgtttaactttttgagaaactgtcatactgttttccatagctattgcaccactttacagtcccaccagaaatgcattagtttctatttctccacacccttgccaatacttaccttctgtgttttttgttttgttttttgatagcagccatcctaatggctatgaagcggtatcccattatggttttgaactgtgcttccctaatgactagtggtgctgagaatctttccatgtgcctattggttgtttgttcttttattattattattattattattattattattattattattatttcttttatattggttgtttgtatatttggggaaaaatatctattcaagccatttgcccatttttgaattggcttgtttggaatttttttgtcaagttctgggaattctttatatattctggatattagtctcttatagacatctgatttgcaaatctcccattctgtgggctgtctttcactctcttgatagtgtcctttgatgcatacaggtttttaattttgatcacatgttttaaggtaaaacgtggtctgaaagcagctggggcccctgctcctaggctctgcctccctccatcgtcccccagggtgctattcagtccttggaggtggtgaggactgctggggccttctggcacagtgatgggatcaagacttggcctcattcacctcctgggctctgtgctgttttctgttcacatgaaggagattagacaggagccccaggggagggagaggatcagaagtgtggctcagccacccagagcctgcctaaactcaggacctccccttcacctctcactctctgttcttctccagccacgctcagaccctgcaccttgcagcactggctaaagaagccagctcctcctaccacatgcaggaggcattcagaccactctgagataagcagaaaggtgatgctggcttccctgtcctgacatctccttgcttccttctcacagaacctgaaacccctatgttaaccttgcttctttgggtcaaatgtatgaccacttgtctgaaatgcctttaacaaaatccagacatccggtggtgatttagactggatggcttctcagaagcttcccagtctcatgtttccattttaaagcaagcatggagaaatttcctaccaaacagtgttctttgcctttgttttgcattacccgactatgagttgagtattttgttttccaatatatttttcaggaacaaagaagtggcatcacagctgggtgtatccagagcttttcatattcagggtcactgtgttcctttattaggataataggctgtctgggggaacgccaggtaaccctggactttcccagtgaatacttatttgggatcctttcagaaggcacctgacacaatcaagagagagggaaagaaatagaggcaaaaaaaatgtaacacagattgagatttattcccaggaatatggtcttccacttgcaagtcctggttttgtggtaaaagagcctttaaagatccctttaaagagcagagtagtgagtttggagaaagtaatcattgcagatgaacttaagccaattgcttattcacaataactgtctttcatcaatcaatttcaacacgcactttttttgtgacattttaacagctctgaaatcaggattcatttcccatcagtggtgcctcctgataaaattggcagcatttgtgggtgtgtgtgttagtagtaggcaaaaatagcggcatgacttccagctgatagatagtgtctgaagttgattgaaatacaatcctaggttcattcaatatctgcaggtacctgagaactagaaggaaccccacaatctcagcaccaggtggcacagcacagtggaagattcaggctgagcaagcagacagataaacagtataatgacctagcaaaccccagcaagctgctcttcctcctgagtggctgggaccacaggcacatgccaccatgcctggcttatttttgtatttttggtagagatggggtttcaccaagttgcccaggctggttttgaactcccggactcaagcaatccacctgccttggcctcccaaattgctgagattacaggcatgggccaccatgcccggctacagcaagctactcttttaggaactcttaggcacaccttgcttgaaagttcatgcatggctgatgtgacggctgtcttgtggcatgcttcagctgaacttctagttgtattcaaaccattgactcttccctaaagtgtttatctgggctcattcagaggagtggcctctttggggtataccatagctgtcatgccagagagaggaaaccttctcactaattcgcatatctctaattccactcatttctccaaagaaacagcattcactctgctaattagcaagccccctggtgttgattaaaaataacctcaactgaatcaaagctgtactctccggaatgtgtgtgtgagtttatgatttgtctttcaaatgctaactaaccacccccaccaggggtatggattaaaactaacattttcatatcatgttatctatgtgaagtatttgaaagcaaattgcaaacagcataataatagcaaatgagtacttgtgacttgggacacatttttcagcaattagcattaaatgcagctttaaaaagtatagatttcaaacaactttgttggcggtaagagtatttttcaagtaaactgtgtgaggtgactcagaagagtggctgtagttgtgaagatgctcttgctgattttgaatacacttatttctatgaaatatgagtggaggctgggcaccatggctcatgcctgtaatccctgcattttggaaggtcgaggcaggtggatcacttgagctcaggagttagagaccagtctggtcaacatggtgaaaccttgtttctaccaaaaaatacaaaaattagctggacatggtgctgtgctatagtactagctacttgggaggctgaggtgggagaatctcttgaacctgagaggcggaggttgcagtgagctgagatcacaccactgtactccagcctgggtgacagagtgagaccctgtcgtgaaagaaaagaaaaagaaaaaagaaaagagaaagaagaaaggaaagaaagaaagaagaaaggaaagaaagaaagaaagagaaggaacagtggaaaagctattttaaaattaatatattgaatatatttaggggttctgaatatgtatgcctaactacattagtgaattaatgctgtgaagagactgtttattagtttatttgcattactggaagttattaagtttttggactctctcattgggaaaatagtccataggcttataatttggccaccttttatgtaaacatattcaataggttatgagttttgccaactgtgtccttcaaggcctagtatccacagagtgtaggccaaagttctgtgttgggggatctttatggatggacccctagcctgagaggaatgagatagccaagtgcaaatttcacctcttagtaattttgcttggtctcaaatggaaaggttttagcctgaaacctcctgagggtgattttgctgttgatttgcctgttttgttttcttttttaaggctatttcaggggaactcagcatgtcctggagagtgcattaaacacacactctctttttgttttgatttttttgaagctatttaaaacttattttaaagctttggaactctcttttaaatgaaatcttacattcaggatctgtatcctaggtaaaaaaagaaatcttgcatagtcaggggtgcctgtagtcccaggtacttgggaagctgaggcgagaaggttgcttgatgccaggagttcaaggctgcagtgtgctgtgatcacacctgtgaatagccactgcactgaagcctgggcaacatagaccctttctttaaaaacaaaataaaacaaatgaaatcttatatggaacacaaatacactgttaaaacattggcagagctttacagttatgttttgacttcagaattcttagaggcccttttgtttcattcaagatgtttctagacctctgcagaaagagataaccagccaagctgctgtttgaaatactagaaattacaatctggattttatagtgttggtgaaattaaggtcttggattatgacggaaagaagctaaaaagaccagtgagttcattttatgctcaatcataactgaaatgattaaacacataggaatcagtgaccacacatgatgacttcctgtgattggccatggatattttgtaattttttttttttttttttttttttttgcgacagggtctcactctttcactcagtctggaatgcagtgatacaataatagctcactgcagcctccacctcctgggcccgagccattctcccgccttagcctcccaagtagctgggaccacaggcacatgccaccgtgcccagttaatattttttgtagggaggaggtatcactatgttgcccaggctggtcttaaacttttgggctcaagtgatcctctcaccttggccttgcaaagtgccaccttttatcacctttaatgtattataagcgtgagctaccacgtccagctgcaatttttttttttttttttgagtacacaattttactctgttccccaagctgaagtacagtagcatgatcttggctcactgcaacctccgcctcccaggttcaagcaattctcctgcctcagcctcctgagtagctgggactgcaggcatgcaccaccacacctggctaatttttgtatttttatttatttatttatttatttttattttttatttttttgagatagagtctctgtcgcccaggctggagtgcagtggtgcaatctccactcactgcaaactccgcctcctggattcaagcaattctcctgcttcaacctcctgagtagctgggtttacaggcacccaccaccataccaggctaattttttgtgtgtatttttagtacagatgaggtttcaccacgttggccaggccggtctcagactcctgacctcaggtgacccacctgcctcggcctcccaaagtgctgagattacaggtgtgagccaccacgccaggcctccagctgcaatttttgacaaacttaaagatttacattttaaatgcaaaataaccacggattagcaagagagttcttatttatccggatggcaagaaaacatgacacaagaaatctcccacttttgaaacaggagggtcaagttgggtcttacctgatagtttgtctcaagctaattaattggcaaagaggttcattgtttagcatctaagttataaacgtcattataaacattctgtattttccattttctatcagtcggaaaaagaaattaagtcctagtgtctgctagggtttaagtccctttagctaaagtcaattctcttcttaaaaggaaacttacaccccatattttctttctcaaagggagggccttatgttatgttttcactataatccagaaaaaagtgggcatcttctggttaaaatagggacagaagtgacctctctttctccctggtggccattacaatccccgcccctccaaaagtggtctctgggtgtcttagtctgtttgagctgccataacaaaatatcatagcgagtgactcatagacaacagaaatttctcacagttcaggaggctggaacttcagtagattcggtgcttttggtccatagacactgtgtcttcttgctgtgtcttcctatggctgaagggcaggtgagttctctggggcctcttttatcagggcgttaagtccctttcatgaagactctgccctcatgacctaactacttcccaaagacctcacttctaaataccataacattgggaattaagcttcaacatatgaatttttagggtgacacaaacattcaacctatagcacaggagcataaccaagggccccacagagggcagtttcaaagcctccaatctcttgagtctctgcagccaacagtcctcagctcaaagggcaggggtccatggaccaccaacatccttcccatccctgactccctccacagaccttcaggcaaaccagaaaccaaaggccgcctactggctgtgtgatctcgggcaaggtccctaactttgggacacctctgttttcctctcaataaaacataaaattaattttcctgcctgaaaattaataataggaagtgtttgttgaacccttacttttatggcaggccatttacatgggttatgtctcttaagtataagaaggaccctatgaagaaagtactgcgattttaattttacaaatggggaaactgaagcacagggagttaagtaacttacctaaggttgcacaggaaacggtgaagcagtctttgaacgcaggtgttttgaaagcagcacttgggcccttacctgctttgctgggatttctcagatggctgaggtgagggtgaatgagatgagacaggcaggcgaggtgaccagcataggtttggttcagagtaggggagagattccctgcttctcagggtttgcatgtgttagttgggtactgtgagggttaattttaggtgtcaacttggcaggggacatgttccaagacgttccaagtgaaggcctgaactgcatatagtactagactccagagatggtaggtttttccgatctgatactcaagatggctacctatagcactagactccagagacggtaggtttttccgatctgatacccaagatggctactaggtgaccagaggggcaggtagctgtactcagtgaatacactagacaaagggtgattcacagggattcactgcccaggcccgatggagtgggatggtgtgagatttcaccgtgccactcgaactttgcactatttaaaacttaagaattctttctggaattttctatttaatatttttagactgccattgacgtcaggtaactaaaactatggaaggcaaaaccttggatgatgtggggagcactctaccttgagaactggtaaagcattattttggggtacacctgggagggtgttttcaggggagattggcttgtgagtcggtggactgcgcggggaaaatttgcccgtaatgtgggtgggcaccatccaattagcatccccacccacaatggtatggccttcccacctctgtctgcgggtaaactctgctcgcctgaggaaccagaaatgtcctctccaaggcagttgccaagaaagataattctgattctcctcaggacccacacatatcactccactttgcttctagacctgcaaccaggcgtgagtcccagcaggcccctgaaggtgaggcccaaaatgtgacccacgaggagctgtactaccctccacaagaaccaaatccagagaacatgtgtggggatggctatcagggtgtgggataatgtggaaggaacatcaagttggatcaggccgaatttattgctgtgggcacactaaacagagattctgcatgtaatgttccagtgtggggagttaagaaaagtactaacactttggttggttggctgaaacatgaatcaaaacatgggccactattaacaagttggaggtgttcgatctcccttagtttatttttatttttttttttattttttgagacggagtttcactcttgttgcccaggctggagtgcaatcgcatggtctcagctcactgaaacctctgcctcctgggttcaagccattctcctgcctcagcctcctgagtagctgggattacaggtgcccaccaccacacccggctaatttttgtatttttagaagagatggggtttcaccatgttggccaggctggtctcgaactcctgacctcaagtgatcggcccgccttggcctcccaaagtgttgggattacaggcgtgagccacggtgcccagccttcccttagtttcaagcagaggaagggatccacaggcttagggagattggaaggctagagtggatttttcacttaagacttactcatcctaaagagctctgattgctcatttctgtaggccagactttacaatgggaaaagcagtcgcttaattggaaaagttaaatgcagtgggaataactggatcccagggtagcaggggccgcgtggcggcactcagctccaacggcaaagtgggtatagttatggttgtgggcagcagaggcagagaaccaatcagaatcgtctgtctcgtgcagatctatggcattggctggtctagaagtgaaatagaaagtctactacgatcttacttgatctgtataagcagacaacttccagaccaagtcaacaaaggcctaattcagagtgtaagaacaggctgaacatggtggctcacacctgtaatcccagcactttgggaggccgatgcaggcagataacttgaggtcaggagtttgagatcagcctggccaacatggtgaaacgctgtctctgctaaaaatacaaaatttagccaggtgtgatggcgcacacctgtagtcccagctactttggaggctgaggcgcaagaatcgcttgaactcaagaggtggaggctgcagtgagccgagattgagccactgcactccagcctgggcaacagagtgagaccctttctcaaaaaaataaaaaaaattaaaaaatcacacacacacacacacacaaaacaaacaaaaaaaccagagtgtaagaacacagactcacagtacctcaatcaattcccagacatgagccagtttatagacccaaaaacccttgaatataggggaggctgggttccctcagggagggggacactactgaaaatttatactattactctttctcccaggcttcgccaaagggatctgtgacccagggtaactgtgctttaggaaaaggaagtaatcagaggtttcatggactgctagacaccggctctgtgctgacattgattccaggaggcccgaaatgttactgtggccctctagtcagaggcgaggctcatagaggtgagctgatcagtggagttttagctcgggtctgactcatggtgggtccaagggaatagacatacttagaggctgggagaatccccacattgcttccctaacctgtgaagggagggctattatggtggaaatggccaaatgaaagccattagagctgtctctacctagaaacataataaatcaaaaacaatatcccatccctgaagggattgcagagattagtgctgctatcaaggacttgaagacacaggggtggagattcctaccacatccccattcggcttatgtatttggcctgtgccaaagacagatggatcctgaagaatccagaagacagtggattatcacaagcttaaccaagtggtgactctaattgcagctgctgtaccagatgtggttacattgcttgagcaaaataacacatcttctggtacctggtatgctgccacggatcaggcaaatgcctttttctccaaccctgtctataaagcccaccagaagcaacttgctctcagctggcaaggccaacaatacaccttcaccgtcctacctcaggggtatataaactctccagccctttgtcgcgatttagtttgcagggcacttgatcaccttatctttccacaagagatcatgctggcccattacattgatggtgttatgctgattggacctagtgaagtagcaaccactctgggcttatttgtaagacatttgcttacatagagggtgagaaatctgacaaaattcaggggccttctacctcggtgtaatttctagggatccagtggtgtgggtggggtatcttgagatatcccttctataagatgagggataagttgttgcatttggcccctcctacaaccaagaaagaagcgcatgaacaccttgggcttgtttggattttagggacacacattcctcatttgggtgtgttactctagcccatctaccaagtgacctgaaaagctgctagttgtgagtggatcctagaacaggagaaggctctgcaacaggtccaggctgctatgcaagctgctctgccacttgggtcatatgacccagcagatccattggtgcttgatgtgtcagtggcagataaggatgctatctggagtctttggcaggcccctataggtgaactgcagcagatgcccttagagggccttttggagcaaggccttgccgtcatccacagataaataccctccttttgggaggcagctcttggccttagtaggactgggccttagtagaaactgaatgcttgaccatggaccaccaatttaccacatgacctgagctgcgtatcatgaactgaatgttatctgatccaccaagccataaagttgggcatgcacagcagcattccatcatcaaatggaagtggtttatacgtgatcaggcctgaacagatcctgaagacacaagtaagttatatgaagaagtgacacaaatgcccatggtttctactcctgctactctgccttctctcttccagcctgcacctatggcctcatgggaaatgccctatgatcagttgacaaaggaagagaaaaccggggcctgccgtccagatggatctgcgtgatatgcaggctacctgaaaatggacagctgcagcgctatggcccttctatgaggcatccttgaaggacagtagtgaagggaactcttctcagttggcagaaattcgagcagggcacctggtcatgcactttgcttggaagcagaaatggccagatgtatatagtttactgattcatgggctgtagccaatggtttggctggatggtcaggaatatggaagaaacatgactggaaaattggtgacaaggaaatttggggaagaggtatgtggatggacctctctgattgggcaaaagaggtgaagatatttgtgtctcatgttagcagtcaccaaagagtgacctcgtcagaggaggactttaataatcaagtggatagaatgacctgttctgtagatgccagtcagcctctttcaccacccatccctgtcttcatcccagagtctcatgaataaagtggccatggtggcagggatggaggttatgcactggctcagcaacattgacttccactcactgaggccaacctggctacaaccactgctgagtgcccattctgccagcagcagagaccaacactggtgtccctgatgtggcaccattacctggggcgatcagccagctacctggtggcaagttgcttacactggaccccttccatcatggaagaggcagtgttttttccttactggaatacatatttaatctgaatatggatttgtctcccctgaatgtgatacttctgtcaaaactaccatccatggactcatagaatgctttattcattgccatggtattcatacaatattgcttttgacaaagaaactcattttacagccaaagaagtgtgacaatgggcccatgctcatggaattcactggtcttaccatgttcccgttattccgaagcagctggcttgacagaacagtagaatggccttttgaagtcataattacagagccagctaggtggcaataccttgcagggctggggcaaggttgtccagaaggctgtacatgctctgaatcagcgttcaatatgtggtactatttctcccacagccaggattcacaggtgcaggaatcaaagggtagaaatggagggaggtggggggcaccactcacccttatccctagtgacccacaaacaaaatttttgcttcctgtttccaagaagacttgatgctctgctggtctaaaggtcttagttccagaggggagaatgcttccaccaggagacacaacaatgattccactgagctggaagttaagactgccacccagccactttgggcttcttgtgcctctgaatcaacaggctaagaagggagtgatggtttgggctgggatgactgatgtggatgaccaggaggaaattgcactcctacccgacaacgggagtgaggaagagtatgtctggaatacaggaaagctctttgggcctctcttagaattatcctgctctgtgattaaggtcaatgggaaactatgacaacccaatctaggcagtactaacaaatggcccagacccttcaggaattaaggtttaggccaacccactaagtaaagaaccatgaccaactaaggtgcttactgaaggcaaagagaatgcagatgggtagtagaagaagatagttatcaataccagctacaaacatgatcagttacagaaccaaggactgtaattgtcatgagtatttcctccttgttttgttaagaatatgtttgcatgtatatatacatatattaacaaatatccttgtgcttctcttatttcttcatcacgtaatataagatttattgaccttgtatcagtagttaagtattattaatgttatatcatactatttaagttatgagatatcaagagaagaataaacattacccaagaactttacctcctcttctgtggaagggatgagtgcattttgggttgtatgcaggataattgtatcatgttttgcagaactatcttattgttattgtttttatttggagattaaatatgatttaggagatgcagatgggtaccaagttgacagggggtagacttgtgatggttaattttaggtgtccacttgactggattagggaatacctagagaactgctaagcgtgatttctgggtgtgtctgcgaggatgtttccagaggagatcgggttgtaagtccatggaccaagtggggaagatccaccctcagtgtgggcagacaccatccaatcaacaagggcccagagagaacaaaaagaggaaattcaaattctctctctttttctcctggagctgggtcacccttcttctccttcccttgggcatcagaactccaggctttctggcccttggactctaggacttgcacctccaccccgcagagttctcagggccttctgcctcagtccgagagttaaaccatcaggttccctcattctgaggctgtaggacttggactcagccacactgtgggcatcccagtgtctccagcttgttagagagcctgttgtgggaattcttggcttccattatcacatgagccaattcacctaataaatcccctgtcacccatctctctctctctctctctcgctatctgtttatctacctacctatctacctatctacttggttctgcctttctggagaactctaatacaggagtatatttgtcttctttctctctttctttcttttctttctttctttctttctttctttctttctttctttctttctttctttctttttttctttctttctttctttctttctttctttctttctttctttctctttctttccttctttcttttttttctttttctttttcttttttttcttgagacagagtctcactctgttgcccaggctggagtgtagtggtgagatctcggctcactgcaacctctgtctcccaggttcaagagagtcccctgcctcagcctcccaagtagcagggattacaggcattcgccaccacgcccagctaatttttgtatttttagtagaaacagggtttcaccatgttggtcaggctggtctcgaactcctgacctcaggtgatccacctgcctcagcctcccaaagtgctgggattacaggtgtaaggcattgtgcccggcctgtcctatttctttatttattttttatacatttcttggagacaaggatagtcttattcatcttttttcccctgtgaaatgaaggaatagaatgatataaagcatgactactcccctctattctgcgtatcacaaacttaaacaatttttatatcagttaaattctcagcttttccttaaatctgcggcagcccacagagaataatcagctattcacttatcccttatcctttctttcttaagctattcacttatccctgattaaaatgcagtaagcagtgaatgaatgaagaaattaatgaatcctacactactttgtattaccccttatttttgcatggctaatatggtcatcctacctaaatagtgtgagagtagagactgtgtctttctttttcttcccatgatattgagtcaaagccagagataactaagggacctaggtaggcaggtctgtggagacccaaccttgatttctattgttgtctgaggcttctctggtgtgtttgagtttccctattactggacatttgcctcttgtcctgccattaggtgaattggtggtgcttctatgagtgtgcacggcttggtgatttagccatgaaaaactaagtgtactatggctcatttacatcagtactgtattttttgcaaagtattaacttttattttttaacctgggcaaaatgtatgtgagcttaaaaaaattattttctttattattctataattttgaaattgtatgccactattttattggtataaaatatacataacatttagcattttaaccatttttaagtgtatagctcagtggcattaagtacgttggtaccgttgtgcaaccatcgccatcatccatcttcagaacatttttatcatcccaaacagaaactctgtgtcctttaaatacaaattccccattctttcccccaagcccctggtaaccactatccagctttctgtttctaggaatttgactactccaggtgccttgtacctgtggaattgtacaacatttgtccttttgtaagtggctcacttcacttagcttaaggtcttcaaaggtgtgtcctggttgtagcatatatcagaatttccttcctttttaaggatgaataatattccattgtatgtatatttcactgatatagtttgaatatttgtccctgcgcaagtctcatgttgaaatgtaatccccaatgctgaaggtggggcctggagggaggtgtttgtatcatgggggcagatccctcgtggcttggtgctgtcttcgagatagtgacttctctcaagatctggttgtttaaaagtgcgtggcatctccccacccactgtctctctctctctctttctctcttgctcctgctttcgccgtacaacttgccagctactccttcgccttccgctatgattgtaagcttcctgcagcctccctagaagccaagcagaacccagtaccatgtttcctgtccagcctgcagaactgtgagccaattaaacctcttttctttataaattacccagtctcagggtgtttgtttgtttgtttgtttgtttttgagacataatcttgctctgtcgtccaggctggagtgtagtggtatgatctcggctcactgcaacctccacctcccaggttcaagcaattctcctgcctcagcctccctggtagtggggactacagttgtgcaccaccatgcctggctaatttttgtatttttagtagagacggggtttcaccatgttgcccaggttggtctcaaactcctgaccttaggtgatccacccacctaggcctcccaaagtgctgggattacaggtgtgcgctaccacacttggcctcaggtatttctttatagcaatgcaagaatggactgataccaccacattttgttcattcatcctttaatgaacacttcggttgcttccaccctttgagtattgtgaataatgcttctattactgtttttaagaaagaagcatatttacgacggtgaaataaacagattgtgttttgctgcatagtttcagataacacttagaacataaatataagaagaagcaaaagtaaacgaaccacaaaaataaaaacaaaacaacttcaagttcaaactatgagcatcattgcttcattaaataatcatttgctgagggcccagggtggaccatgcatacaccccgagtttccagccagccatgggaggcttcttcctgaaggggcagacgaggcctagggagttagctgtgactgtaggtacgatgtggttggtgctgcaggtacatacaagcaaggtctctgggtcttcagaggcagggaaagaacacctctgactgatgaggactatgaggagggctctcaggaggtggtagactttggcccagtgatgataggggtaaaggaggaaatttactatggtaaattcccaactctgctcttctttgctaaatccaaggtgtatttttctgtttcttggacctgttgcaagggctctgggtctctgtggtgcacattactcacagctcttaagtggtcttcatcctgcatttaagcaatcttgttacttactcttgagttgctctgtctccaacaagtgccttggatttatttgcttggcatggttcttttgtgtgtctcagggcaaccaagctctggtcagctttctggaagagttgagttgcttctcttgctgtgatctgaggcagctcctgaccctcttccacccactggctggacacagacttaagatcccactgtccgtccaggggcagcctctggtggagtggagagtgagcagcccagctccctgctgcggtgcggccttgggaaagttattccgcccctcccaccttcatgtgtaacatgagaagactgggtgacctctaaggcccttttcttttcagctctgtggcattttttttttttttttgagacagattcttgctgtgttgctctggctggagtgcagtggcatgatcatggctcacagcagccttgacctcctgggctgaagtgatctcactttagcccgcccttgagtataacaccatacccagctaattttaatttcttctttgtagaaacaaggtctcactatatcacccaggctggtcttgaactctggggctcaactgatcgtcccatctcagtctcccaaatttctgggattataggcatgagccaccacacctggccttagctctgcaattttatgatcactgtcttagtccatttggcatgctatcacaaaatatctaagactgggtaatttataaacaacagaaatttattgctaatggttctggaggctgggaagtccaaggtcacagtgccagcagattccccgtctggtgagggcccattcctcatagatgtctccttctatgtgtcttcacatggtggaaggggcgaacaagctccctcacacctcttttctatgagcactaatcccactcgtaagggcagagccttcatgacctagtcacctcccaaaagccctgctccttgtcaccacattggagattaggttttgacacatgaattttggggagacacaaacattcagaccatagtaattgcccatattattgtcacaggatgagccgcagacaaaactcctcagacaccgagttaaagacggaagcggtttatttggccggggggcatcagcaagactcctgtctcaagggccgagctccccaagtgagcaattcctgtcccttttaagggctcacaactctaagggggtgcgtgtgagagggtcgtgattgattgatcgagcagggggtatgtaactgggggttgcatgcactggtaattagatgggaacaaaacaggatatggattttcgcagtgcttttctatacaatgtctgtaatctatagataacataactgattagatcaggggtcaatctttaactaccaggcccagggtgtggtgccggctgtctgcttgtggatttcatttctgccttttagattttactttttctttctttggaggcagaaattgggcataagacaatatgaggggtggtctcctcccttattattaattacctccctccagcactcttggagtggatgactcagcagtctgatcattttgctgtttttaaggaagcttgatcttgtgccatcatgtgtagcaagtatatgttcaatagttgaacaagctgactgtcctgacccagctggagttaggctgaaactgactggatttcttcatgctgtcctctttcagggaagcggcacagcaccagctaggcagagacgccccaggccatgttagagctttgagtgaggcctggtaacagggaggcgctgtcacctactggccttgccaatccagctccaagatgctgagcctgaagctccccaggctgtttagcatagaccagataccccaggtatgtgctctattgattatgatggttcatttccagagtgtgaccagggcttggcctccgcaatggggggctgttgtcttcacctagtctgttctgtacaggcccattcccttcaaggaccccttcccacacttccttgggggatattacagcctcctacttcccccacctaccttgaaatggaagtattcccaaagttgtttaagttgtaacccttccttgcaacatctgtgtgttatccagaagcaaagtcattactgagattcaacctgaagagataaagccagcagcagctggctgggtaggaagtttattttttcaggcccctcctatgggtgcttgaaagcaggctatgggcaaaggcacaccaggtcatggctttgctcatccccattacttgcaggatgcccaggccaggccttcactggggcgatggggagggttgttgaatgagccttagcattgccctttagtggacccatgggcctgggagctcacaggcaggtaccctgaaatatgtgagactcactgatgatctgctttactaagccataggtgagcctggttgtgtgctacagagaactggtgcacttcctccttctcttgcaaaggaaacatcattgtgttgcacccctttgttgatgtcaaatttccttcctttttgactaagaaaagtgggtgtcatttcatggtgggaagtttctttgggaagatgtgacagagtggaggagagttctacttggcttggctgattaccaagcacttatgacttgccccagaaaaataagtttgaaataaactcaacatcaccaatggaaggttgagggggaaattgccaaaccctaaccctaaaagcctgtgaagccaggtgattccaggaagatggcatgggggaaaaccgtaagtggtgcagagctgtttggtggggtgagctgaggaatgtggcaagtaataggcaagctacacgtgtggctgtctcccatgacactgggcagagcacctgcctctgttctcacagggcaatcaccttctccttttggtgcactttgctggttggttctacccatagagcattagcagctgtgattagtgggaacacagtgtgattcttgaatttatttactcatgaaatttgtattgactgcctactatgtgcaagggattcagagaataattacatacaaatcctgtccttgcgtgactcatatgttggtcaggaagatttttaaatgtgcatgagaaattcttttctaaagtgggttagggtctatcttaagacagggtgattgtttcagagaagggattggtcacttccatcacgagggagtgtattagtccattctcacactgctataaagaactgcctgaaacctggtaatttataaagaaaagaggtctaattgactcacagttcctcatggctgtggaggcctcaggtaacttacaatcatgagggaagaggcacgtcttacatgacagtaggcaagagagagcatgatgtgaaggaggaactgtcagacacttatgaaaccatcaggtctcaagagaactcactcacagtttgggggacaacacccccatgatccaatcacctcccaccaggttcctcccttgacatgtgggaattatagggattacaatttcagatgagatttgaatggggacacagagccaaattatatcagggaggaagtgatcagggaaggcttcatgaagggggtgatctgaggggtggacaggattgtggaagtggggagagcattccaggtggaaggagcagtgtgagcaaaggcctagagatgggagatcatggggcaggtggtgatggtggggggactggggagcgtcttgggggtagaggttatgggagtctgcttagatatctttctggacattttggtcagggttggattcagagtatgtccgcaggaaagaagtgaagggggcagagtggtatcaataggtcctttgggtaacctgctgggaatctgaatgtatggagattctgaatgtcagggctggacaaccctggcagaggctaagggagaaagatgaacatgtcctctctgtccagtttttcgtaagttagaggatgatgatatctttagtgaaatggcactagctagaggcagaagaccaacatcacactttgcagccaccgtttgcttcaaaatctgccttgggctccagcatccactattgggtttttgggcatcatgcccagggttcatgaagccatagagaaaatatagtggctctgcctgcctggagggtagttttacctgaggatttgggggcaaagacatttattagtattaaaacagatgcacaggtattaaaaatggaatgcacaatttacatgaatatttaaaataggatacttcatacaattgttaaagcttacctttggtgggatctgtgggttccaatacttggtttttagagtggcctcaagcaagataatctctctacctcagctttggcttctgtaaaatgggaatgacaacagtatctgcctcctggggttgtgagaattaaatgagataacccaagtgaagtgcctggcacgtggtgaacaattaataatgttggttgtcattattagcattctctcctaggctctttagggcactttgaggggtagagcatgctggcaggagacttcagaggccctgtccatagactcgaaccccggctccctcgcctgctgttcaccaccttcaccagcctgatccctccccacctcttccaccacgtcccatccacagaccctcttctctttattctccccaggagatgcaaccttcacttgtcttgatttctgtttgaagaaggctttcctctccccaacctttgctccccctttgtgacttccttttttatggagtggcaggtgcctgctcccttccccgagctccttcagctgttggttgtacctctacaagctgctctgtacagctgcctctccttttgtgtatcagccagctatgtgacctgggccacttcactaccctgtctgggcctcagccatctatagggaatggtgtgcccacctctctgcatcatcagagttgtaatcctggtccattcttggtgcattcctggctgatagattgttcatggaaaagggcagtttctctcttccctcagaaggcagaatttgtgtgtatgcctcataatatttagtctcccttgtgtccaaaactaagcttgggtacatcagagggtcattaaagatgtgaacaaaacctcaaggaatggaataattatctagatgttgattcttacacagacccctttagagacaaaacagagaggcctagaaaaaagacaacaagttcatatgcaacatggcgtgacactttgccaggaaacaagaacatcgagtgtcaaattgctaatctgttttttgtttttgtttttttttttttttgagacagagtcttgctctgtcacccaggctggagtgcagtggcactatcatgactcactgcaacctccgcctcccaggttcaagcgattctccttctcctgcctcaacctctcaagtagctgggactacaggtgcacgccaccatgcccagatactttttgcattttcagtaacaacagggtttcaccatgttggccaggctgggtctcgaactcctgacctcaagtgatccgcctgcctcagcttcccaaagttctgggattacaagtgtgagccactgaacccagacaaattgctaagctttaaataactacagccttgactcacaggctacaggtaaacacatcccatagtcccagatgccttagtttaggggcatggacaggaggattccctgaggcagtggtctacacagagaggaaaagcaacgccgtttccagacttgcactgcagctctgccacacagtcataaacttagtctcagtgttcttatctgtaagatggaagtgactcctgttaagtcagtctcacagggcaattgtgaagatccaataaaaatgaaatagaacagtgggattattatgaatgaaggaagcacagccagatcagtgtctggcataggtgtttggtaggtgggctcaggcactgggaacaaggagccatctcaacaggtaaatggtttctccagcccagtgctattcagagagagtgcttagatcaccaatgtcagaattacctggtagcttattaaaatatgatagaagcagggctcggtgggtcacacctgtaatcctagcactttgggatgccgaggtgggtgattttaaagcaatcaccattctgtctccaaaaacaaaacaaaacaaaacaaatatatatatatattatatacatgtaatatatattatatatgtaatatatatacattatatatgttatatatatacattatatatgtaatatatatacattatatatgttatatatatataacgagttgtgatagcaggcatctttgtattgttcttggttttaatgaaaagaaatgcttttaacatttcaccatttaatatggttgctgtgtgtgtgtgtgtgtgtataagtaatcttttcatctttatcagattaagggtatcacttcatattctagtttgctaggattttttccctcataattttttttatttttttggagatggagtcttgctctgttacccaggctggagtacagtggcaagatctcggctcactgcaacctccgcctcccaggttcaagcaattctctgcctcagcctcccaagtagctgggatcacaggtgtccgccaccacaccaagctagtttttgtatttttagtagagatggggtttcactatcttggccaggctggtcttgaacccctgacctcgtgattcacctgccttggcctcccaaagtgctgggattacaggcgtgagccaccgcatctggccttcccttatgaattttattttattttattttattttattttattttattttattttattttattttattttattttatttatttatttagagacagagtcttgctttgtcacccaggctggagtgcagtggcgcaatctcggctcaccgcaacctctgcctcccaggttcaagcgattctcatgcctcagcctcccaagtagctgggactacaggcaagtgccaccatccctggctaatttttgtattttttaatagagatggggtttcatcatgttggccaggctggtctcaaactcctgacctcaggtgatccacctgcctcagcctcccaaagtgctgggattacaggcgtgagccaccgtgcccagcctcctttatgaattttatagaactctttattcctatcatcttttgagatgatcatatatgattcatttaagttgttagtgtggtgatacactgattaatttgctaatgttaaaccaattttttgtttttggtttaaatacagcttgattgtgatagatctctttaatctattgctagagtcagttagctaatattttgttcaggatctttaagtctattaatgagttggcctataatgttttcttcttatgctgtccttgcctggacttgggattcaggttacgccaaccacaagtgagttggagattgctgcctatttattctatggggaaaaatatctaatattagaattatacattcccgagtagttggtagaatttgtctgtgaaattacctgggcggagccaccatattgcccaactctaagggggcaccatttcccttttagtctacgtgaatggcaacctctggagttatgcagggaacaacttggccctacagctgaattttcttgatggaaagatttttttataacagcctagttgagacacaattcacatattataaaatccaccctgtaaaagtgtacaattcagtgttttagtttgttgaacacagagtatattgcacaaaaccatcaccatgatcaccagtttttagaacattttcatcactccagaaagaactacacccgttagcagccattttctattcccttagttcctggcaaccacctaacctactttctgtctgtatggatttgcctattgtggatatctcccacaaatgggattgtgcaaatatgtggccttttctgactgccttctttcacttagcaggatgttttcaaggttcatctatgctgtagcatctatcagtactttgttttaatggccaaatcatagtctattgaatggatataccatagtttgtttatccattcattagttgatgaacaggtgagttgtttctattttttggatattataaatatgctgctgtgaacattcatgtacaagtcatttaggtggacaagttgtcagtctctttggtgtacaacccaggagtggagttgctggatcatatggtaactccatgcttccaagtatatggagtttttatactactgatttaacttaattgatcttggtctgagaatgccccctgtattattccaatccttgacgtttgttcagactagcttgatggcctagcacatgaataattttcatacatcttctaagtgtgccgataaataatgtatagtctccagttgttggaggaagtattccatatttgtccataagatcaattatctttatatttttaccaattttgttctacttgatctatgcataattgagatgtgttaaaaaatcttccactatggtggcaaatttgtaaattacttcttgtaagttaatttttactttacgtattttgagcctgtgttttttaggtatatccaagtttataattgtcctattttctatcttcccgatgttgcaaaggtatgattttgtagtgattatctttatatctagtaatgctttttgccttggaatgcatccgatattaatgtaactactctagcttttgttatcatttgtttggcttatctccttcctttgactttcaatccttccccatgattatattttagctgtgtcttgtgtaaacagcacatggtgagattttattagtttgacaatatttgttttttagctgacagtttagtctacttatatttataatgattactgatatccacatttattttcattgtcttaaatgcttttgtcttgttttctctatttgttccttgtttcccttactttctttggattgagttttacatttctctttttttttcttttcatatgctatttttcccttccacctgttttataattaatgtgttagaaatatgctctgcgtggattagtttagtggtcacttcagctattttaacatgaatagctgtactagacagggtcaggctatgctgagttaaaaattaccccatatagctcggtgacttaacatagcaaaggttatttcacatcacactacatagctaagtggtcagtgagggactgagacacccaggcagccatctcctggctgccccctctgcaacgtgcagcctccaaggtcatcccagaaggggaagccagggtctacagcaataccaccctgaacacacctatcttgcctgatctcagaaactaggcagggctgggccaggttcaagcttggatgggagaagaagaagagaaagttagtttccctagaaacagactttgagaaaaagattcgggcacagaaagtttatgggggagtattctcaggaacaacccctgcaaggatgtgaaggaggcgggattgtgcagaaggagaagctgcgttagaaacctccaccagtcactcaggagctctggaagttagtgggcctttcagagttgtcccaaatgggaaaaggaggctaggaccttgatctgtcatcagtggatgtacacagcccctggggaggagtataactagtgcccgttggccaaaaacaattcccatggcatgatgagtggctcagttcggaagagtccttccgaaaggtccttcagaagtttgtagtgatatctgcaagaaggctttctgcttttttttttagaccaagtcttgctctgtagccaaggctgcagtgcagtggcactatcttggctcactgcaatctccgcctcccaggttcaaacaattctcctgcctcagcctcctatatagctggattacgggcatgcaccaccacgcctggctaatttttgtatttttagcaaagatgtggtttcaccatgttggccaggctggtctcgaactcctgaccacaggtgatctgcctgccttggcctcccaaagtgctgggattacaggcatgagccactgtgcgtctgcttttaactcttctggcctagaagtaacattaactggaaatagtcacatggccccaacctaactttgagaaagtctgaggaatgtaggaaagcacatgtaatatttggtgaacaccaactgtctacttaacctcttggatctgaaaactgatgactcaataatgctagaaatgtatcagttatttcttcaaatagcacatcaaaaccatttatatcttctccttctggagaaatgttctctgtgtctcttattagctttttcatattttctatctattactctctctggactgcattctgggtactttctttggatctttcagttgactaattttctcttcagacaggtctggtgtattatttattcctttgatgtattttaaatttcaattattttttaatttctaaaagttatattaggctcttttttttgagacagggtcttgctctgtcacccaggctggagtgtcatggtgcagtcatggctcactgtagccttaaactcttgggctcaagtgatgctcctgcctcagcctccccagtagctggaactacagctgtgctccaccatacccagctaattttttaaaaaaattttgtagagatgagggtgtctcactgtgtggcctaagctggtcttaaactcctgggctcaagaaatccacccaccacggcccccaaagttttggcattacagggttgagctactatgcccagcctgttcttttcaaattggcttgtttcctgtttatctttatttctttaaatatattaaacacagttattttatattttaatatttgttctttgatctctatctctgccgtctactgtttctgctgtttctcactcatggtgttttctttccctatgtgtgcatgcctgtgttaaagtagaaatccggctgggtgtggtggctcacgcctgtaatcccaacactttgggaggccaaggcaggtggatcacctgaggtcaggagttcgaaaccagcctgaccaacatggtgaaaccctgtctctactaaaagtacaaaaattagcagagcctggtggcatgtgcctgtaatcccagctactcaagaggctgaggcagaagaatagctggaactcaggaggcagaggttgcagtaagccaagataacaccaatgcactccagcctgggtgacagagcaagatcctgcctcaagttaaaaaaaaaaaaaagtagaaatccttcagagaggatttgtgtttgcttttgttacttacctgagggaactacaaaattttaacctctttctatttgtaatcactttaattttttcacttgagatttcctggaccacaaaaatagtaggggcatggaccacaaacctatatgaagactagctgatggttatgaattttgggagagatttttttttttttcagagaaacaactttccttatcgtcctcttctggctggttgaatttatttcacactcacttatctttagactcctagctttattggcaaagtctcgtattagattccctgcctttggtgggccttgggtttcatctcttgtttacaaaatctggcagcagagactctgatggtgaatgcagcttacctcacagggttcctggtttccctctgttttggggctttgtgacttctttacttttgtgtgatttttgctgatacactggcttatgatgcatactccagacagcatattaattgcattaatcagaaagatccttcataacatctaatcgaccatcattcggccagaactggagtgccccagccattcttccatgacagcatttctataaaacatgtttgtagcaatccttggttccaccagctgggtgctgtgaagcacacaggagttttgcagtttaagactagggtttgcatcttggttctgctatttattatggccttgggaacttcgtctcactgagctgcagttttcttatttgtaaaatgggtcgacagtccttgtcttgccatgctctcatgatgaacaaaagaaaccagacctgcccttaacagatgctaagtctgaataaggaggacaaatgcaggccataggctatatgtctaaatacttaaaagttataaatgaagccaacaaacagttatgtaaagtggttctattctaccttaacaaatccccctttattttattatttacttatttatttatttattttgagacagagtttcgctcttgttgcccaggctggagtggaatggcgcgatcttggctcactgcaacatctgcctcccaggttcaagcgattctcctgcctcagcctcccgagtagctgggattacaggcacctgccaccacgcctggctaattttttgtatttttagtagaggcagagtttcaccgtgttagccaggatggtctcaatctcctgacctcaggtgatccacccgccttggcctcccaaagtgctgggattacaggagtgaaccactgtgccaggcctgacaaatgcccctttataaggacagaaaaagtgaaactctgatttttatatagctaaagtcagcaaaatatgaaaaagaactgagtttaattattatcgcacatgtctaaatgttacattgatgaattacttatgtttgaaagagtaataaaacaaaaacatgcataatttataaattattacgtgtttattccatataatttattttatttcttcatttcagcaaagttgagttatagtgttgtaatcgacattatcatataatttgtggtctattgacaatgatgttaaattaaaccactattcctgagtcattgtagttcttagttttgtttcttaaattaatttcatttaggagaaacttctgctgagattccattcagttttattgaggtagaacagctggaattacaaaaaaataattcttaagtccacattttgaatcagaaatgaattatacattttttctttttttaattgaagccagtttgagcaagaaaattataaatttttcatatgaagttcaaacattgtaatgaggctgcagcatatgataattatattaagcagaaaaattattaaatattttaattccatatagattaccatctcatcgtgctatctttactccctcaaagtaatatctagattagtattcatctattttattaagaaaagtatattagaaagagataatataaagaaaactgaaaacagtagggttttacttagtcaaaattacacctcagtctacagtgtccggagaaataatccctacagaagttaatttcaggatgatttgtacgtgaatcttctcttcacagtccagagacatttttgtttccttttttggattttatctgattggaaagtcacctttattatgcattttatgtgcgactcctttggtttagaaaagtcctatacatatttaaaataataaatacgtatttttaatccctttaaaaatggaatagccaaacctagatttttttgtaggcttttgctaacattatctcataacaaatatcagttgagagctcaaattcaaaattgatgttatttcctatgaaaaatagaattttctgttacactgatttcttctcatcgtcctatatcttacctaaatcaaatctaagcgtttaacagcatggatttgttattctcattgtgtgaatgagaggagttaaggtcaaatttggtatgtgtttcagcaagatgtcccatttgagagaagattcagagaatgtcatacataatctttgaactattccatagaaaatctaattgacagcctaatcaattttagtaagcaattcaaaccatgtgctaccacacccagcactaagaatactttcaagccaccttacatgttcggccagaagaaatttaccattgtcttctgtaaatattgtgctgcacgtaaaaaaagcattctttggccaggcgcggtggctcatgcctgtaatcccagcactttgggaaaccaacacaggtggatcacttgaggtcaggagttcaagaccagcctggccaacatggtgaaaccccatctctactaaaaatacaaaattcactgggcatggtggcacatgcctgtaattccagctactcaggaggatgaggcaggagaatcacttgaattcgggagatagaggttgcagtgagccaagatcgtgccactgcactccaccctgggtgacagagtgagactctgtctcaaacaaaacaaaacaaaacaaaaagcattcttatgcttgactgaatattgaacacattattttttgaaaaccatcacaccactgttgtaagttggcattttcctgtaattgtttcataccagcaatggctggctattaattcagcctatttaaagttctagtaattgcatgtgtgttgtgtgtaagcgatgttttatgttcttttaattgaaagcccaatcacttctcctagtaagcaattcaaaccacatgccaccatacttagcactaagagtacttctggattttcggtgaaattctgatcttgcattagttttctgttactgctgtaacaaattaccacaaactcagtggctcaaaaaacaaacaaacaaatatatgatcttacagtcctgtaggttacaagtctgacatgggtctcactgggtaaaatctaggctttggtggatgctgttggggagaatgtctccttaccttttcagctcctagaggctgcctgctctccttggctcctggccccttcctccatcttcacatcagcaatgttgcatctctctgaccttattccatagtcactttttcctctgagtctcttcttctgcctccatcttccatttttaaggaccttttgattatactgggccgacctcggtaaacagagaatctccctattttaaggtcagtggattagcaactttaatttcacctgggacgttgctgcccctttgctgtgtaacctaataacctaatatattcactggttctggcaattaggatgtgaacatttttggggagccattattctgtctactgtagagttagcaaccatgttatactattatcacaagcttgcctatggcagcttttgaaatcaatgcctaaaactgaaaatagtttttctacttcttaaatcaaagactgcatttttacaacaaatgtaaaaccagcggaattgctctgttatttcaactttcttactttcttctgctgtagatcaatacgtctataatgctagtcattcaatgggacttttcttctctagcacacactacctgagttctgtttacttttcttttttcgagtcagagtctcgctttgttgaccaggctggagtgcaatggcacaatctcggcttactgcaacctctgcctcccaggttcaagtgattcttctgcttcaacctccagagtagctgggactacaggcacgctctatcatgtcccactaatttttgtagttttagtagagatgaggtttcactatgttggccagactggtctcgaactcctgacctcaagtgatctgcccacctcagtctcctaaagtgctgagattacaggtgtgagccactgtgcccagtgctatttactttttaaaaacattttgtgtatctttttttactttattgtccattaaattattaatactctttggttcctccatccctgatattcatcatttatttcattaatttttatccgtcttacatgttcagccagaagagacttcttctgtaaatattatactgcatgtacaaaaagcattcttatgcttgactgaatattggacatgtatttttaaaaaacatcacagcaatgttgtaaattggcattttcttgtaatggtttcatatcaacaatggttggttattaattcagcctatttaaagttctagtaattgcatgtgtgtggtgtgcaattgttgttttatgctcttttaattgagagcctaagtatttctgtcctatgggaactaagcatggtcctgcaagggatgtggcatactgtccaacctagagcctggtgcaccgcaggtacccaggaaatgataggttataattgctgcagcaaggccgggcacagtggctcacgtctgtaatcccagcattttgggaggccaaggctggtggatcacctgagatcaggggtttgagaccagcctgaccaacatgttgaaaccctatctctactaaaaatacaaaaatttagctgggcatagtggcatgtgcctgtaatcccagctactcaggaggctgaggcatgagaatcacttgaacccaggaggcagagcttgcagggagccgagatcgcgccactgcactccagcctgggcaacagagtgagactctgtctcaataataataatgataattgctgcatcaatgcatggcctcccccttttccctcccattcttcccctgccctctgccagcaaacacctcatcagactccccgctagcctctaactattccctgtcctggctttccctgtcaccatgtccctcttacatacaaggaacttcctcttctgtagggaactggattctgggcagggaggtgacagcacgatgctggggtgggagtccggctttgaagccagaggcagttgcagcatcagcaggccctgggagctggttagaactgcagactctcgccccagccaccacactgcagtaaggtgcccaggtgatctgcacacacttgcagaagaaagtttcagaggcactggcttgcataacctcaccgctcatattagtttgctagggctgccataacaaaataccacagactgagtggtctaaacaacagaaagttattttctcgcagttccggagactgaaaggtgttcaagatcaaggtttggacaggggcagtttcctccaaagcctctctccttggcttacagatggccactctcttgctgcctctgcacagagtcaccactctgtgggtgctcatccctggtgtctctctgtgaattcaaatttccccttcttgtgagggacaccaggcagattggattaggacccaccctaatggcctcttgaaagatcttatctccgaatgcagttgcatctgaggtcctggaggttaggactttaacttaacagatgaattttgggagggacacagttgcctcccagatttagttcataatggcactttaacgaagaagaatctaaggctcagagaagtatgtcacagtccaaaatcatagtacaggccaggcgataagggttttatctctcgacagagccctccccaggcggagcaatgaaggacagtgcacaagaggacaggaaatggagtgtgctgtttgcattgaggtttcagctttgcttccgttacttttgagaacttgaataaatgccctaacctctccaggcctcagtttccttttctgtgaaatgagacaataaaaggctcttcctcacaagctggttgtgaggattccgtgagcaggaattgcagaattcatgtgaatagcgcctgaggtcccctgatcctactctgcctcttctctttccctgctatccaaatctgccattatttactgctggccaaaaatgcccagtgattttccccaggtggtttgcagtttaatagctagaaaaaccaaaggcttgaaactgtcacggtagaattgtaggcattggctagcaggtgcatgcaagtcttggccatgcaagaaggctttcctggatgctgagcttgaggcaggaactgaaagggaaaacttgctgatgtgcccttctgctcctagttcctggaggttctctcttctaaataggctgcatatgatttgatttcatttcactctaaattgctcagcctgcaactaggggtgcaaggtggagtcctacaaatcaattctgctgtgcaaataagcaggcacctgcttacttgggggtgcttagaaatgaggccaagctacgaagtgttgaggaaatgattgcagttttcctttggggtcaaactgggtttagaatacaaaattgtcttcaaatattagtttgtcctttcaatgtatgtaccatgcgttttatgaaggtctgctctatgcaaaacactttgctaaggctagagtgggaagacggagagaatgtttcttctttcctgtgctcacaggagctcagagcaggagtgcaactaagacctagtaatagggttccatagacagaggttcaagttggggagggcagggcaggtcagtcctcttagtctaagctggaacatcattgtcctgggacagagggactccttttattatcctgtatccgtccatttatttttttggaaaggctgctttaaatcttgcccctattacgtggccaatattgggcttcccatccttgtctggggtcagcatagcaggtcagatggaggcaggtttttttaatctgggctcagccctggctttggtggcaaaatatcctccccaggtctggggccagattcctaaatgaggtcaagttgtccaatgtatggatttcccttctgttccccgctggcttttgacgacgtcagtccccctagttttgcctgccagaatgccaggatccacagagagaagggaagtagtcacaaactgtgagtggccttttcctctagcttctgtccagccactgccactgtggctgtcacggggtctgtgctctcctgcagccctacccagccttctccctgcaggtcaccgcccccacatgtccagtgctctgaaatgtttctgctctcactggtcccttgtcacaaagtctcttggtttataggatctgctagtctaattcatatgaatgagtaaataatgattaatggagtctgcattggaaccagtggccagtgctttaattaataattataaaacaacaacttaaaaggaagagagaaagaagcttgaaaggtagaaggatagacccagtgtggagctcctgggagctgttatttctgctagaaggctttccgagtcctgccaagcacgtgccgtcctcctccacaggatcaaaggctgaaggccattggcctatttgcctccttgtcatcagccttagtggggtggaaatctgcaactcaagattcctgctgcccgttacaggaatctgtccaccataaaccggggatgtcagcagaattgaatggtgaatcaaaaactggaacaaatcattttaattacctaagacccaaacctaattcacagtatttcttcactagaccatgaatcaacttcattttatcccctccctctagttgagcagttcaacccagaactgaactaagagttgtctaaaacttggagctactgctggaagggaatgtgctgaccattcagctagccaagccctctcattttacacagaggccctgagagctgtgacccagggcttcagctgcacttaaacgcttcacttttctcaaggccacatggcacctcggggacccagatttgactcattactctggcagcccctcaccttctgcactgttccatgtgactgcttgacttggaaccccaagaaatagcacaaggctgggcacaatggctcacacctctaatcccggcactttaggaggccaagatgggagaatcacttgagcccaggagttcaagatgagtctgggcatcatagtgagaccctgtctctgcaaaaaataaaaaattaggctgggcgtggtagctcatgcctgtaatcccagcactttgggagcccgaggtgggtggatcatttaaggtcaggagtttgagaccagtctgggcaacatgatgaaaccctgtctctactagtaatacaaaaaattagtcgggcattgtggcatgcgcttgtaatccccgctacccgagggggctgaggcaggagaatcgcttgaacccaggaggcagaggtttcagtgagccaagataacaacactgcactccagcctgggcaacaaaatgagactccatcttaaaaaaaaaaaaaaaaaaaaaaaaaattagctgaccatggtggcactcctgtagttccagctactcaggtggctgaggtgggaggatcatttgagccaggagtttgaggctgcagtaagccatgattgcaccactgtactccagcctgggcttcagatcaagaccctgtctcaaaaaaaaaaaaaaaaaaaaaaagagagagagagatagcacagactctggtatatattgtacatttttttaacagagaacctctcttacactaagaaattgataccccaaatgagaaatgggtggctagattgaagttcctctagccttcccctcacagccctagaaattcaaaggagagggtttgcaacttattgtgacctgatttagattatgattactaatattatcattgttattatttgcttcaattaccctactcatttataatttacgtttcaaagggtatggcaacatttatctaaatcagtggtccttacctgggggcgatttttgcccccaggggacatctgacaatatctggagacatttctgtttgtcacaacttggggggtagggtgctgacagtgtgagctagtggcatttagcggataaaggccatggatgctgtgaaaggactcacaggttggcccccacaacaaacaatgatctggcccaaagtgtcaatagtgtcaaaattgagaacccttggtctaaatcaacacagaaggggaaaacaggtctcctgcaatcctgctacctcaacaaattaaacacttcacttttctatgttcctcccagcctctgccccatggtgtaaacttcattttcccaagctcttctaaccatggcaggaatatagtttaaattccacatttcttcacttattattgtatcctgggctgttgtgcctctggcctcattatcttctcacttaccacttttagtggatgtaatacaatactccaggcaggttgataccccatatttcacctgaccagtccgggtttctcagtgggtgttttttgggggggacttgccaaatgggctgcatgggggtgggggtgacttgagcagccgtgctgtgggcagccacctcctcttcctgcagcccaggcatcagcatcgtggtcctcatcatcaaaagccctttatgaagcaccttggtgaatatatcctggcaccgggggcatcttctgcagagttcttcccaccagcccctgacatgcagggcttgccagctcagacagacagcatctgtgtcagctcaccaaaaaggcgtccaaaaactgggctgtaggccccaggcagaggggtgagaaaacggattcttaggcaagattcatgccaagagtaagtacgccggggaatgcaaagacaggctggattcccaaagggagcctggcccttgaattccctcccccagctagctggaggcttcttggaggacaagggattttagaagctactgcgagggaaggagagagtgaggggaacagcttaacaggttaaggacttggggtcaagcgttccaggcacacagagcacggcctggaagatgtttctccagagaccttcgtgccaccctctggtctcacctcagtgtccttttcctttgcctctgcaggtgttccatgagcaaggcatcctgttcggctaccgccatccacagagttctgccactgcctgcatcctcagccttttccaaatgaccaatgagactctcaacatttggactcacttgctgcccttctggtaccttctggccccctcgaccggcctgtctccttcaggagccctggagaccagggtgtcttaaaacatggctagtgttgagagggctgagattctgtgctggggtttggggatcccccgtgggtacacgcgggtgaagggagtgtgtgacagagggaagagacattgggtgtgccactgggatgacctttaaggcatggactggggtaagatttgaggggaaatcccaaaagtgcctcagtccttcctgctccctgctccggtgcctgatatgatagcatttaccttcatctccggtcttggagactttccaggtcttccaggagccctggttaaaatgtcactagtttgagcaagtcaacctctctgagcctctcattttcctacctgcaaagcaggagtgatggtccgcacctccccaagggttgctgtgagggtttggggagaaaacattggtagaggcatctgccacagagttgtgggtgttccgtaatcattctgggaaccacgacaactgggaggcacttggtcaggcagcctgtagatggagccagctaagagcaaagctctgggaagcctgtatgcagaaatggaagtggccagggaagcgaagaggggccttgctgagaaaggtgggggatgaaggccaatgtcacacactgcacacctttgcttaaggaatggaggatggagacagggtcaaagcaccaaatcacagtggatctgagctggaagaactcagaggccattcaagccactgtcccactcagaccaccactggtcgatgtagacacagccgagagacggggtggcgtccttacgtcatgcaggggcgccgtggcacaggctggtcactggactccctccagtcatgttgagaagagatgaggagtgtgccatgagtggagatgggcccaggctccccgcacaggggcagccagcctgagtagaagtcagatgacagacccggggccaaaatgcaggggcaggctgtttggttccagcagccagctcagtggagaggggagagagctcagtctggtgtggactagggtgatctgtaaaggagtgtggcagccctgggcctgcggactgggcaggggtggcagcacagccctgctccaggggccatttgtcatttttaaaagtatacatgcttacaaattataacccttcagaagggaatagagtcaggctctgccactggccccagttctcctccctggagtggccagggggacctgcttcctatgcgtcctcctggagcttttctgggggacccaggagcatctgtgctgtgagcatccacagcatctgcctctttccctgctgccttcctcttacttccctcccttggagatctcactctgtcagcatctgcaatctgcatgtctcctggactttggaacatctgcttggtgttccattttctggatgaatcatggttgatttaggctgttttgagatttgagctgctaaaagggtaccagcctgtccatccctgcttgtgggtcttgcactccatgcatggatccctgtagggtgattttttgctatgttacagctgagccaagctgggtgagccgcacccccatcacctccagcactgcctatgcacttctacacggtgccaggctctcagagatgatcctgactgagcaacagagagtagcaggaaggacttggggaggtctggatcaagatgccctaaggaaatgggaccactgaaaaattgaaataactgaaggatacattttgagaaacagcaaatagcttaagctttacttcccgctgggacaaaattaaaaagtccacaagtgtagctggaaggatttagcaatgttccttcagctcctgcatatgaaaagctttgtagagtctcctcccttggaggagttagtgagaaagggagccagctctctaggagtgatttgtggaagcgaggtgctctgcaggcgggacctcatgcgtggattgtaggccaggcagacctggtgaagaattttgaagtgtctctgcatagagatctaggctctgctaagagtcagctgtgggactagctattccgaaaagtgattgtactcttagtggaggaacagtgtggaggaggagggagaaaatagttctcttggcctcggcttgcaaggctccacctggggcattgcttctatttgaggagccttcctacaagagggacatagacaaactacatggaggaaggacaaaccacggggatggtggtaacgccacatttagatcctgcgaggaatggctgaaggaaccgggagtatttaatgtgaagttcaaggaggtgggagggggttagaaagactgccttgaaatatttgacaggcggccgggcgcagtggcttatgcctataatcccagtactctgggaggctgaggcaggcagaccacaaggtcaggagatcgagaccatcctggccaacatggtgaaacgctgtctctactaaaaatacaaaagttagccaggcgtggtggagggtgcctgtagtcccagctacttgggaggctgagacaggagaatcacttgaacccaggaggcagaggttgcagagagccgagatcgtgccactgcactccagcctggtgacagagcaagactctgtctcaaaaaaaaaaaaaagcatatatatatatatatatatatatatatatatatatatatatatatgtatgtatgtatatatgtatgtatatgtgtatatatatatgtgtgtatatatatgtgtatatatatgtgaccatatatatatatatatatatgaccatatatatatatatatatatatatatatatatatatatatatgcatatgttaagcttgttttctatgatcctggtggagggaactaaggccaatcaaatggagatagattccaggaggacagatttgagccaatgaaggagaactttccagcccttggagctgctttgggaggtaatgagccccccatccctggaagcatgcaagctgaggctggagaatcactaggggattggactagatatacataaagcctctcttcttacttcacctgcccattcccaacgtactgcctcccaattaaaaaaggaccccccaccttcctagcacatggtatttccccaaagtgagaacacgaaggaattagtcaccgcgggggaatggagacagtagataggcgaggatctaagaggggcttccatcatggagggtgagcaggtcctccatgttcatcatggagggtgagcggccctgcgtgctcatggtggagggtgagcgggccctccgtgctcatggtggagggtgagcgggccctccgtgctcatggtggagggtgagtgggcctttgtgtacatggtggagggtgactggccctctgtgttcatcgtggagggtgagtgggccctccgtgctcatggtggagggtgagcgggccctctgtgctcatggtggagggtgagtgggcctttgtgttcatggtggagggtgactggccctctgtgttcatcgtggagggtgagcgggccctctgtattcatggtggagggttagtgggcctctgtgctcatggtggagggtgagtgggcctttgtgttcatggtggagggtgagtggccctctgtgttcatcgtggagggtgagcgggccctctgtattcatggtggagggtgagtgggcctctgtgctcatggtggagggtgagtgggcctctgtgctcatggtggagggtgagtgggcctctgtgctcatggtggagggtgagtgggcctttgtgttcatggtggagggtgagtgggcctttgtgttcatggtggagggtgagtgggcctttgtgttcatggtggagggtgagtgggcctttgtgttcatggtggagggtgagtgggcctttgtgttcatggtggagggtgagtgggcctttgtgttcatggtggagggtgagtggccctctgtgttcatcgtggagggtgagcgggccctctgtattcatggtggagggtgagtgggcctctgtgctcatggtggagggtgagtgggcctctgtgctcatggtggagggtaaacggggcctctgtgctcatggtggagggtgagtgggcctctgtgctcatggtggagggtgagtgggcctctgtgctcatggtggagggtgagcggggcctctgttttcacggtggagggtgagcgggggccctccgtgttcatggtggagggtgtgtgggcctctgtgttcgtggtggagggtgagtgggcctctgtgttcgtggtggagggtgagtgggccctccgtgggtgagtgggccctccgtgttcatcgcggagggtgagtgggccctccgtgttcatggtggagggtgagcgggtcctccgtgttcatggtggagggtgagcgggccctccgtgttcatggtggagggtgagcgggccctccgtgttcatggtggagggtgagtgggccctccgtgttcatggtggagggtgagtgggccctccgtgttcatggtggagggtgagtgggccctccgtgttcatcatggagggtgagcgggccctccgtgttcatggtggaaggtgagcgggtcctctgtgttcatggtggagggtgagcgggccctctgtgttcatggtggagggtgagtgagccctctgtgttccaggttctttgcatggaggtttgtgactgcactgtatatgacagacatcaagaatgacagctactcctggcccatgcttgtgtacatgtgcaccagctgcgtgtacccacttgtgtccagctgtgcgcacaccttcagctctatgtccaagaatgcccggcacatttgctacttcctggactatggtgccgtcaacctcttcagcctgggtatgtgaggccttgttcttgctttccttcccctgcaaccgggctgtttgccccttctcctgtgagctagggtcaccagaaggctttgatgagtttgcagaagaatccagggattatgccagtgcccctgtccaggttcccaatgggtgttttataagaaactgtccataagcatgctgctaaatatttagccactggctctgtggggacaacagccccgatctgcagtgttgccagtttctgtggtgtaaatcttcccatcatgtccagcttcaacctactaacatgacatcacagaacacaagggtgggaagagatatgcgtagcacactattacagaaattccaccatgcagatacagtagatgtagtcattgagtactcagtacttttgttaatatgatttatttaattgcaagtttctgtgatttaatttttaatgatggctgtgttcagcactcagctctctcacaggccagaatgaactgactccagtacatcagtgctggtctctgtcatgccaggcaagaagaggagggtgaggtcatgagcctcgtatatccagaggcttagcacaatcagagagatgctcagagtgtgcgggaatagatcagcaacctaagctggtgaaattcggtgctgaccgccccctcttccttgtctttttctttgactatgatgctccctcctctggcctcttctctcctccccttgtgggcatgcatctatccctaaggatatgagttctagattcttcctccaggtcccattctaggtgagaaaaccaattattgtcttccttgcccaagaggttgtccatgaggagcctacctccatcctctttcttcatatacacacgttcacactcacacaaacacacactcatgcactgacacacactgacacacacacatacaatgcactcacacatgcacatacacacactcaccacatatacacaatacacttacatgcacacacacacaccacatgccacatgtactcacacattgacacacacacaatacactcacatacacacactcacaccacatacacacaatacactcacatgcacactctcaaacactacacacacacaccacccatactgacacacactacactcacataaacacacatcacatacacacaatacactcacatgcacatacacatactctcagaccctccacacacactcacatccacatacgcaccacacatgctgacatatacacacaatacactcacatacacactcacaccacatacacactcacatgctcatatacgcacacatactctcagacactacacacacattcacacactcacactctcacatacatcacacacacacaccacacacacacatcacacacaccacatacatacacacacaccacacacacgctcactcacacactctcacacacatacacacacactttcccacttcactgcccactccttagtgctctgctgcccagtccccagcattcactagaccgtgcccctttccgtgtgagccaggcttaccctcaggctttgatgggtttgcagaagagagtggggaatgtgcgtgcccctgtccagggtcccggcctcctgactgccaagattgatgcaggggtccttcaggcctcctcaatgcccctctctttctctggtccctgtcacatccctccctccctcccggattccctcccaccctccggatcccctcttaccctccatgtcccccctcccctgggctggctcccctcctctgctttctggcacacatgggtggggaggctcagaagtggtcctttgacctctcctctcacacgatccggctccccagagatctcctccatgcctactgcatctcttccacctccggagaaaccctgtctccaatgtaaacctcttacctgaggtccacgccacctcagagccatgagaccagaactgtacctgctcccgcccctgcccctacacctgctagccctctgtatgtccaacctgactgatggtcgcgcccctactccttctcctgagtcagaagcctgactaatcctcggggtccccttcctctcactccccacccacgcccaccctctggccaattggttattaaggccaggtgacttctctcctacctgctgtaagcggcactgcccctttgtcttgactcaggccccggcctctcacttgcacagttatcacagccttctccacctcacccagcccctggaggcttccacaacaccttctaccacatcaccctcccactgtcagggccctcatcagccagaagcagtccagactgcttagcggggcgacttccttggccctcggttgcccgccccggacttgttttgataagtgtgggcatttctggagtaatcgctgcatggcaagccctggtccaggcccctgacacacacccctgaggggccacaccacaccatgtttaatggtccaggtgctggcacctgattccaccacccctaactgttagaggttcctgtgcaagtttcataaccctgccaagcctcaattctttcatccacaaaatggatgtaatatcttctttgtgggtatgttctgatgattaaatgtgttttaaatgaggctcagagcctggccttagtcggcatctgagggcagccattaccacgatgatcttgttaaccgtggcagcagtccctgaggtaggtcctagtgtcatatccatgcgtaggtgaggacagtgaggcactgtggaggtaagtgacaggtcacacagctgtgcatggcagagccagagtgaggactgaagcccatgtggtccaccaccaacctgtcccctgccttcctccatcacgggcctcactgtctgtctgtgtaagagttcctcttgttgccatggtctcccttctctgtatcctcccataggccattccccagaactccctcttcccttccctgcaggctgcaccacgggagcctcaggggcccctgccctgtgcccttcctccaacccccagacctggatatacccccaccatgattcttctgatccccagcctgccagccatgctggcacacctccattgctgagaacaactccggagcacagaagatgcttccaatctgtttttctagcccatagcccagtgcttgatgtggggaagtgttcaggaaacacggaaggaacatctagtccactgagagagccattgattccatctgggactcccggctccaccctctgcccctgcctccctcctccctccctgtcaaagccctcaatcccaccagtgtagcgccctcctgccacctcccaggcttccaggggttcctccctcaggccatcctgtgtgctttcactaggttttggtcatcagaatccttcagtggctcccttagtgcctgaaagaggaagtttcctttccttagcctgcatccaaagctgaaagcctccctgccctcaggctcttgtcagaatccgggatgacctaccaggctttgttccaagatcagctcctgtgccttgtgctccacccatcccgaaagcctgccccacactggaacctgactcaggctctggtcttttgcttctggctgcggttctgggcagggtcagaagctccctggctcttgcatggcccacagtttgccccagttggcatctgctgagcgaatgcatcccagtccagcagggaaccccctcccagtatggggccagacaaagggcttgcctgtccctctggaggcagcttcccactgaaatctcgcgggctgcctgctgcagctgggagtatgggaccaggaggctttggtgttcaccctctttgcctgtgtggccagctttgctagatccacctgtcactgggataaaagacagatcaacctgtatggcccaaagccttgttcagccctgagctaggactccacaattcctgatgtctttggaatgacaggtgacctaggcatggccatcaggccttgggctgcctcccttaggggagacctcaggaggtgagggtgcaggtccaggcccatctccccagctgaagcacacctggcccctttgaaaaggacagtgatctcccctgctcttccaaataaatgcttcagcaaaaaggtcgctagaaggtccttaagcaacccttctttcacaaacttcaaaacctaaaacacaacgcaacacccaacctctcagctggtctgtctcccagctgctgctatgacatcctcgtctcagcaagggccctccctccagcactgatctttctaccaggagcacccatgtccctgggcaggtgagatgtgcacactctgagtagagctcagctcgctgggtctgtcgtcatggaccacagcatgtggctaaagcagggactgtcactaacctgtctgggtttgaaacccatctttgttaactctctagctgcaggaccctgggcgagtgattaaacctctctatccctctgcttcctatctgtacaatgaggataagtgcagagttatgaaggaggatggttgaagtattatgtgaggtcatacatgtaaagcccttggagcaaagctgggctcacagtaaattctcaggatgggatttgggtgggcagagaagagaaagcaggacatcctagaagggggaatggcaccagcgagggcgcagagccaggactgtgggaatgataagggccaagccagatgctggggacagtctttgcaaggggcccatgtggtgccaaggcctggctcctctcccaaggctggcttttcttccccaggctcagccattgcctactctgcatacacgttcccggatgcgctcatgtgcaccactttccatgactactacgtggccctggctgtactgaacaccatcctcagcacaggcctctcctgctactccaggtactggtcgctctgacctcagatgggaggggagggagggtcttgcatgcagctccctgcactctttgagggagccggggaagaggtgggctcaatggaaaaggtgcttgggaacctaggactccgttccaggtggacttcctatgctggcaaaaccagcttcctgggcacgcaagctccaggcctccatgctcagagagtctcatacttggtttaatactctgctgcctttttttgtttttgtttttgttttgagacaaagtctcactctgtcacccaggctgaagtgtgatggcacaatcttggctcactgcaacctccgcctcctgagttcaagcgattctcctgcctcagcgtcccatgtagctgggattacaggcacccgccatcacgcccagctaatttttgtatttttagtagagacagggtttcaccatgttggtcaggctggtctggaactcctgactgcaggtaatccacccaccttggccctccaaagtattgggattacaggcgtgagccatggtgcctgacctgttttttatttatttatttatttatttatttatttatttatttatttttttgagacagggtctctctctgtggcccaggctggaatgcagtggtgcgatctcagctcactgtagcctcgccttcctgggctcgtctgctgcattcttaataatttgtaataatttttgaacagggaggtccctgctctttgattcggtacaaggctttacaaattatgcagctggttccatttgctggacaagtggcttatccaccctgaacttcagtttgctcatctataaaatgaggccattacaaatacccctaagacaaatggaaggattacaggtaatgtacccaggacacttagcacaagcctggcacagaggagatgtcccataaatgtgtggtcactaatggtgactgggtgtgtctgcctctgggcatatgtgatggatgatggtgttattcaaatgccctatgcatccctcatcagtgagtcaggcccagcttacgcgctctaattcccactgttttttttttttttctttcaagaaaactcatgggggtgtgagtgcagagaatgttgttatggggataactacaccaatttattcagctctttgtagaagtgaactgcctgaaagttccttttccctaaaatactcaggaaatctcccaaatggttgtgttggggtgacagccctggctgaatagggccaaggctggtacttttgggctgggggcctttcgtgctggtcaggaaaggtaagctggcaggtacatctgagttctctgtcctcccgcaatggcaactccagcgagccagtggagtctccctgcctccacttgcccccctctccccaggaaaaaacaggcaggtgagatatgccccatctggtaacttctccagaatgattttgtctccaaattcctttgggtgacacttgggatgtgtggggccagcaagtttcacaagggagagcaggcaagtttcacaaacaggacaaaccagtttttttgtttctgttttttatttttaaatggaaggatagattctgaaacagcattgggaatacttgttccaattcgccttccattcacctgcgctaaggtgggttggaagtgtggagctgccttccatgggagtgaaagtctgtttctaggagtccctgccgtggatgaagggaggtataacagatatagaacagtaataaccctgcggaaacaagtccagcagagatgaagcaagccccggagacctgggtgcatgggcttgtggactggccatggtccaggaacctggacactcttggacctggtccttggaccagtcactgccccatctggttcgctctcctagggctgtgtggctctggcgtttgaaatttaggattagacagggagagtaccacaggttgagggggcagaggaggaagagaaggcttcgtgagtgtggaagaaagtctccagagtgaggctgggtgcagtggctcacacctgtaatcccagcattttgggagcgccaggtgggtggatcacctgaggtcaggagttcaagaccagcctggccaatgtggtgaaaacctgtctccactaaaaatacgaaagttagctgggtgtggtggcaggtacctgtaatcccagctactcaagaggctgaggcaggagaatcgcttgaacccaggaggcagaggttgcagtgagctgagagcatgccactgtactccagcccgggcagtggagccaagaaaaaaaagaaattgtctccagagtgaatgatccaagatggcttccccatgagctcataattcaaattcttagaacacttgctggttttattttatttttttttgttttaagtagagacaaggtttcgccatgttggccaggctggtctcgagctcctgacctcagatgatccactctcctcagcctcccaaagtgctggtattacaggtgtgagccaccctgcccagcctagattactttcttctagccaggagtcttccctgatggttcagatataacggatggggtcttttggatgtggcatgcctggtgtctttggaggaacttatctgtcagggcagctttgccagacatctcctgggtgcctgagtttgggggcttctccctttgccaatgaaatgggttatttatttatggagtacatctgtgcctattccatctatccacccatctacacacccgcccacccatctaacattccttaaatgcctgccatactccaggtaccacgttaggagctgagggtgccagaaggatgcccttgccttcagagagcacccagtgccataggagagacagactgcagatgcccccagaggtccatgaggccatgatttccgttagagtgtagcaggagggagtgtaatgtaaacaaataatgataaggcagaatgacacctgccggtatacacagggttctgagaagtggctttaggactggatattgaaggaggtagaacactttagctgaagaggaggacatagcaaccagccaggacaaggatgaggactacagagagggtgggccagggtggggaagcagcaaggtgtgttagagctgccagagtctgcaagagtagatggaggagagcagctacagaggggcttggatggtgggctgggggcctgtgggtcctatgaggactggccctttgctcatgaaggatgagaatctcttagggaaaaaaaaaaatcctacgcactcagcttccatgccctgaggggtttccaggcatattagcagcaactgaagtgggagctgaggggagagggaggtgaggggctatgttggaatcaaaaaggaggaagggggcacatgccacactcttgcacccaaaggtagagtgggcatgtggcccttccagtgccctttgtacctcgtcctcgctccacgttccctgacccatggttttgctgctcttacaaggcctgtcctcccctctcttcattccctgtctctgcctttggtgtctggagagtgagaaagctgactcgtgtgcagaagtgatgctggccctgagtaatttcagaagaagtgggtagagaggagggtgtgggtatctggaggcctgaatttcaaccctgctcccccagacttgctgtatggcctcagggcagtcactgtccactctgggcctcagggtctacgtcttcaatgagggcatctgagacaataccctctgggtcctctctggtttgggcatcgtgcaatgtcgatgccttagtgtcttctccaagcttcctttcccagctgtcttcctcccccaggctccacccctgcctctccctcctgctccatccggctgcagttgggcaggagcgggagagaaccaccttcccctccagggaggggaagacctcctgggggagaccaggaacctcagtatttgcttgacagttatctgatgcttgcccgaaaatcagggttgaaatggcattcgttccattacaaggcagaccattaaggccaatctcaacatagagagctttgtcgtcccctgagtggtttttggttcttattgtcatggactttggttcaaatgaaaatgttccagaaaactgccttctcattctgtagcatttgagaggggaaatgagagaatgcgtgccctcttcgtggttcttggagcaaggtgggggtggccgaggccctggcctgctcatgcctgcacaggaaacggctgccactcccttcaggaatgtcagttacacagcaagtactgtatggacaaatcactgtccatctccttccagtgcatccaaccattgattgttttttttttgttttttgttttttttttttcaaagagctgctgagtgaaaaacctcctggtcagagcagtgagggcgagagattaattttcacccatgagctctgctctaaggacagcttagaggcagttgctgaggcagttcagaggggtggagctgacctggaaggggtttgaggtcagcgctggaggtagaaggctcagcagacatggttctcagacagaggcttggccagaggataaagtgctgctatagccagttaggggcatggggaaatgtctacatccctgcagttctccaaaataagacaactcctacacaataaaacaaccataactaccgcccccatgtacacacacacgtgcactcgtgcgtgcgcctctgcaatagaatgatttttccaaaggcccgctagtttcaagccctagttccggaattccagttgccaatccttccagcttttttgtcagattgtgttgaatcgaccctttcttaacgaaggcttctcccgtaacccagtgtgtcctgccaacctcgttctgagcagagacctcacttcctctatagcagccccttagccctctggtgcgggactgccctaagcccgagcaggctgggctgtggggccgcacgtggggcgcctctgaggatgctgcggctgtggttctgctctggctgtggcgacatcgcgtggcctaatgcggaactgcaacttggtagcggacggcccctctcccgagctactggcccttctgcctttttctctctgttgctgtctctcttctcttctgctttttctccttctcttttccctctagacccggctttgcagctggagaggctggtccgtttgcccctggggaaacactttatcaggccgagcgaaatgttgtctcaagtcacagaaaatccatgctttgggggatggccttcgccagccacagccagatttcttcgcgtgtaagtggccacaggggccctttaagagcgagcctctcaacctggagacggcaggcggtggcagggcacagggcaggagggggcggcctgccgcggcagggcagggtctgccggaggactaagaaggccggtgaggcagatacctggctctcgggatagcaggagtgtgtgccctctgctccaggggcagagcgggcagggaagggtgaaggccgggcggggtctgagtctgcgcagcctactgcctgagacagagggggtgacacttgggggccagaaagcccagggtttaaatcctagctctgcttcttattggctcatctgacttcaggcaaatcacccagaacctatttgttccctcctgttcctattatctggaccaacatagatacaaggtggggatggggagagaatggagctccacgatgcatgtgtttttaaaagctgctgtttagtctgtgcgactgtgccatgcacagttctaaacacctcgggagcatcgtttcatcaaatccatacaacgaggctgtgacaaggcacagtcattgtccctgtgttacacatgaggatcaggaggtacacaaaggttagtgacctgccgaggtcacgtggttgtgaagggcagggtcaggatttgaacccagtgtgtcccaatcaagctctccacataaaatcacagtgctgcgctgcctcacctctccgggagtttggttctttttcgggggggatgatgcatcctagttccttctccttgagcttctcacctggtacatgccatgtaccatgtatgacttacaggcagggtcaggaaagaagaaacacgaaagtgggctggagtgaagttggggtttgtcttgggaggctgtggggcttctccgggcacacagtggtgtccctttctcctgaaacaggaatctccgggtgggccatttgtgctcggttgccctgaggactgagtggagcacaatagcctggagaatgtccgcatcctcagacctgcttctgtgctgggtccccaggatccaggcctgaccagatctggcacctgcctgaggagggttccctaactgcccaatgtggaagtccctgcatactccatgctgagagatacaggcagcagctgggtttatggtcaggtggctttactggctcatacgagatatgaacagcctggccaggtgaaatcggtctgggctcagaggaaacagcagatggcatttgaaggagaaggaacaggcttgtggactgggaccgaggttcttgggagcagagataggagccacagcaggacacagaccccatccctccagtgtgatagggggcagaactgtcagcaaaggctgaaagggcccagatgcatgcattgcctttacagactgcatcagaacagccatcccaagagcctcagcgtgtggctgtgcatccactgtgctgggttccttaccctgcagccctgtgggccccaagggaggacacagccctccacagtacacctcagcattgatgtggggactttacctgtccctactacctggccttggtggcccagccagggcccatgagcacttccttacccaggcctcagttcagggctgtgattttgtgcagagaccctccctgcccctccccatgtcctcccagtgtgcagcctgctgtctgtgctacccagttccccataccctgagctgctgccccaggctgggcccaagtcagctgaggccctgtcatgttctgtctggggggacctgcctctcttctcaacaatcagcatcacttgttttaatgttgctgtcagctgtctttggattggaggttgggtgagggtggcaatgaagaagagaaggaaagacttcacgtttatttagttttcccaagccaagtatccctgtgtgtggtataaatattccagaaagctctccaagggtcaaacacctacttgaacccaggtctcctgcatgataatacctgggctccaactagatgggtgcatctcagcctctgcagagtgtgccccccaagagtctgtggcagtggatcccccgattccccctacccgttccctgtccctgtagcaactagagttttaaaaggttctttggcagttacataacttggcccttgaagggtttctgcccagcgcctcctttctggcttagtctggacaccactgcttcccatggtcaggagatggtgtccctggagatctttttgcatctgaagttttgtcacttccattggggtgggaggaatggacgaggctggtggagaagctgctggccacaggagcttgtagaaaaatgcttgtcctctgttgatgaccaggccctcggtgtgcatgcatgtgcgtatgcaatttgctgagactcttttcattccatttcctccccactttccttccctgatttaggtttcttgaaatccagaagcccagactctgtaaggtgattcgtgtcctcgcctttgcttatccgtacacctgggactccctccccatcttctacagggtaaggactggctgcatctcctctctgcctgttggcaacaccaggaagtcagttgttttcctgagcttctggggggtcacagcactgcaatgggaaccgcagaacaaaacaggagtcgagacccaggtgaagggggccagcccctccacacctgtgggtatttctcgtcaggtgggacgagagactgagaaaataaataagaagatttttcttagtacagatcaaaatggagtttcttatgtcttcctttttctacatagacacagtaacagtctgatatatctttctttcccccacacccaggtgctgccttggtggcacttgaggagtggttaggagatgacataagcacagaggccctgactgacaatatgactgggggctcgggaacgtcatagaacaggcagcctggggctgagtggagtgagcaggagagcgagctctgcaggcaggtctccaatacttgctgtcagtccctgggccagttctctatgcctcgatttccttcatctgtaagctgggcctgataacacctcatgggctgtggggaggattacacggggaacatgtcaagtgctgactggtagcaagagttcgggaatgcattgttccatcatcaagtagtatactgttagtattgaaggaaaaggcatgaatgagggtcttaaaggagcgatgggaaagagatggagagcataaaggaagagagtgtaggagggacaacaagtaggactagaaggggaaagtccacgcactttcaaaccatacgggcttgagttcaaattctggccccactgctcactggctatgtgacctcaggcaggacacacaactctctaagcctcagattagtttcctcatctgtacataagggtactaggcctcctttgtaggggaaaacaatggatctgataggctctgcggtgcctgtccagtacccggtgagtgaagctccctcctagaggcagcgtcctgtgggcttgaagaataaagcccagatggcagggctgagggacaaggggaggggctgagctccacccagcagctggggcattgagcacgttctctgtgctctgcctctgtgggtctgggagagcgccaaagatggggctgcagcccgttcccctcactccttcctcaagggcgcagaccacacacaggaaaccaagagcagacagagcaattctgtcccatgtacctccaaatcaggcagtgcaagtcctgtgttgtgacaagcatcgtgtgcttctggcatgtggctgagtcagaggagggcagagggaaggggaggtccagttctaagtggtgatgttgatgctggaatcagcctgcctggattcagatcctgacttcacttctcactaagtgatgtgcaagtcactctctggcccaccttcctcacctgcaaaatggggaagatagagtctgccttatgataattgtggctcaggtgaaatgatgcatgtaagaggcctggcctgctgccctcggtaagtggtggctactatgactttataacaataatacaaaaactatacttagctctgaaacagtatagtggccatcattgatacttttggatgactcagaaggccttccagggatttctaggccttaaagccttaattaggagcaccagttcagtggatgtgctgataaaaagtgagttccagtgtgaatccactaaacagttgacccttaaacatgggttggaactttacatggattttcttccacctctgccactcatgagacagcaagaccgaccccttttcttcttcctcctcctcaggattttctcaatatcacttgcttttctctagcttactttattgtaagaatacaatatataatacctacacaaaatatgtgttacttggcagtttgttacaggtaaggcttccagtcaacaggaggctattagtaattaagtttgggggagtcaaaagttgtacatggacttttgactgcagggggtcaatgcccctagcctgcatgttaagagtcaactgtacttacattttaccccagaaagaataccaattatctaataggattttttgtctttcttttcctttcccattcctttcttctttcctttttctctccgattcagttaagtaaataaaccaaaagactctcatgagtatttgggggattgaaatacaatagtctcgagtctcaatcgaccacactcaggataggagctctgctcacatggtgcctgagtttcctctaccaggtcacagacctgaggaggtgagggccttggcctctggagtttgtgtatgtgtgctaacatgtgtgggtgtcagagcccccaaagtcccagatgcaggtgctgagaaggaagagggcctgcctcaggcctgtcctctcaagacctgatgtttctttaaacacctgcagctattcctgttcccaggggagagtgcacaaaatgaagccacctcgtaccaccagaagcacatgatcatgaccctcctggcctctttcttgtactctgcacatctgccagaacgcctagcccctggacgctttgactacatcggtgagtgggcaacagccctgctgctctgctcattgccctcctgactggggagggtcctgtccctgactccagtgcacgtagctgcaaagggcagggaagggcagagagagaggccaaggcgagtaacattgcaagttgacagaggtcaggatgtctgcagcaggtgcattgttaggtagcatgggcaggatggagggcaggtgggcccaggagcctaaagcattctgatggggtatggagccagtgtgtcttattgtcatccagaacatggaatcccatgattaagtgaacattggggctgggcgtggtggctcacacatgtaatcccagcacgttgggaggccaaggtgggcagattacttgagactgtgctcaagacaatcctgagcaacatagtgaaactccatttctacaaaaaatacaaaaattagctgggcatggtggcgtgcacctgtggtcccagctacttgggaggcgttggtttgagcctggaaggttgaggctacagtgagccatgatcatgcactgcactctagcctgggtgagagagatcctatgtgaagagaaaaagtacattgggagcagccgaggagaggaagaggaaagaaaggatgaagatggctctgagggtaccagacaacagggggctgtgcagaaaagggaaaaggggagaaagcatctttctttgtcttgagcatggtggacgggagggggccaggggttcagggtagagcagtggtttctccaggggtggtcatcagccagcagcatcagcatcatctgagaacatgcagattctcaggccccaccacagacctcctgaaccagaaacgccaggagtgaaacccaatactcacacagaggccgagtcatcctccagatgaacctgagctcacttaagtttgaagtgatctggtggagagaaggtgtcagagtcacgggggtttccacctgctggcagagttctttccccgctctgtctagggaaggaggggcgggtccctgcagaatgtgcctcctccgctctggctctgggactggctaggaggaggaacccttgcatcatttctggtgaggctgacaagactttggggtgagagttccttaggtgagtacatgggaatcaaagggccagtcattgtccccaccagggcaggaagcttgcttctccccaagcccattttgttcctgattttccatctcctctcactaaaagatgtggccagatgcagtttgtttgatctgattaaagttttatctccttttcttcttttgttgtgtcagaaggggttgtaactagtaaaatgcttagagaacagatttccaaaaaggaggaaaaggagaggccagggaatcggagtcaccagcatcctgactgccatgtccacctccccagccccgcttaatgaagtagaggtggctgtgtagcaagttttggggttgcaggaaaaatggccctgggccttcttttgctaccactcaggtttcttaataacattttattcacctctgtcccatcctcttgggcctaggggtacagagctgaaaaacacccctctgggggacatttcctagaaaatagttcatgacagatcattaacaagatttggaacattctcagtccttaactaacagagtctgctggaggtgggaatccctctctgctcctgctcaatcttcctaactctgctcctgctcaatagtagaggtggccaggccggttcattcctaggacacatttattgaatatttcttctgagataggtcctgggggtgaaacactgaattttttatttttctagagatgggatctcactgtgttgcccaggctggtctcaaaactcctgggttcaagcactcctcctgccttggcctcccaaagtgctgggattacaggtgtgagccaccatgcccagcctttttattttattttttttaaaccaaaagagaaaccttatttaactcttatgctgcattagtttgctagggctgccataacaaagtatcacagactgttgtggcctaaacaactgaaatttattttctcacaattctggaggctggaaatctgagatcaaagcgttggcaagtaggcttctccggaggcctctctctttggcttgtcgatggccgttctttccaactgtcttcacatgatctttttcttgtatacgtgcatgtctgtgtcctaatctccttttctttcttttttttttttttgagacggagtctcgctctgtcgcctaggctggagtgcagtggcatgatcttggctcgctgcaagctctgcctcccgagttcacgccattctcctgcctcagcctccagagtagctgggattacaggcacgtgtcaccatgcccggctaatttttgtatttttagtagagacggggtttcatcatgttagccaaaatggtctctatctcctgacctcgtgatccacccgcctcagcctcccaaagtgctgggattacaggcgtgaaccaccgcgcctggcctaaactcctttccttataaggacaccagtcatagtggattaggcccatcttagagacttcatttttatttaattatttctctaaagatcctatctgcaaatatggtctcattctggggcttaagacttcagcacatgtatttttcagggacatcattcagcccataacacatgtggtcgcctccttactcctggggtctgagggttgtcccccaaagctgcccccgaccctaggcattggatttgttttctcaccaaccacccagcacgtccctgtccctgtcactcccactaccctctactgggctcccagcctctgtgaagggcaccatgtgagctgggtccagcatggcattggggaggaagagtcctggtcatatctgtgactaactggcagtagggagaggtccacttggttagtggccaacagaaaattcagccagcttctccctcagcactgaagtgagactctgagctgatcagtgctggctctcaagagatgaactttggtgcctaattttttcatctgaaaaatgagactggtggataagttgttttaaaaaagaatttggatttggttttctctgatgggccttttatttttcccatattgcttcttaaaaataaatttattaaggtatatttcacatattcaataattctctaatgtcaagtatacaatttaatgatattttcagtaaattcaccatacatcagttttagaacattttcatcccctccatcagacccatgcactgttaatacctattctcaccccctgcttgaggcagcctctaatctactctctgtctttatggatttgcatattctggagattttatataatatgtggtctcctgtctggtttctttcacttagcatcatttttagcatgaatgccatagcatgtatcagtactcattccttttcattgctgatcttgacggccttttgtgtttgccataggtcacagtcaccagctgtttcacgtgtgtgtgatcctggccacgcacatgcagatggaagccatacttctggacaagactctgaggaaggaatggctcctggccacctccaagcccttctctttctctcagatagctggagccatacttctgtgcatcatcttcagcctcagcaacataatttatttctcagctgctctgtatcggattcccaagccagaattacataaaaaagaaacatgactcagaccataagcttttcatgccagatgtcaacattaagctgcaacatcctaaccaccataagccggaggtggttacagcttatcatggcctaaaatattcataatggttggtgtcttttgaatgaattcatgtcaaaaatgttattcagctggggaaatttctctaaatgtacactgattctgtgtgtgtgattttaaaaggagaatatggttcaagcaagtccttgttaaggcaaactattgatatttcattaattttaaatttacttaaaatgtggttttaaattctatttaaacatttggattaagcatattactctggagctttgtattattctttaaaaatgaatcttgcttcatttgatgaatttcatgtcacaaagcttctctcaagagctctcgtagtggcctgtcaaccactttcggagaatgagccaggtcagtcactgggaggacctgtgaaagaaagttggtcactgagtgccttggggactggcaaaacattccagaatgaagagagctgtctggggagagcccttcttcccttctccacctagtgaagggagaacagaaggggagtcctctcttcccacaagtccattctgccttcaaagtgtaagttctcatgtcattatggatttggagtttgtcagtttttttcttaaaagtccacagcggggtgtcatgtgttctgttatgttctgttttctggttgccagtttgatctgcaaagtatttttcagtgcaggtaaaatgtgttaaaccataagagttgactgagttaatcccaattggttgtgctcatatgccaccttttaaaccaatggaaattgctatatttggggatgtcatacatttgatattgcttcagcatttcaaatatgttgcaaaatttagtatccatatgcataagaagttaatcaccttgccagtggggtggtcacatatagtgttctcaagctttactgtgaatcagaaacatccagtaagcttgtgacaaatgcagactcctagggaaaaccagggggttctgcttcactaggttaaatgtaggttttgtagaggagatctgcactggagcaagtctcccagatgattctaatacaggagggccagaggccaaacttgaagaactgctggtgttacatgttccaaaaggcattagacctatcagctttgtttcgcctgatctcaagttttagcaactcaccaactaaggcgtaacctcattttatgttccagcgttttctactctgaatagttctaaaacactgagcattttctcatttgttgcattactgattaaagttcagtatttcatggtgttttcagggaacacagaaatgcggatgcaaaacaacttttgacagaggcccatcaaacccagatctgcacttggtaatgacttaggggggcttcctcacaatgcaggatcctctttgctgactcaggaatactccatattttagactactgcctctaccattaactagcccagacatttgaatggccttgtaaacagctcactgtctaatactcgaaggacaagtaacaatttatattggatgagagtggtcaagaaatatgatttcgttagttttattatctgtttacttcctctggggaaggcagactgataaaattatatgggctggtaaatttttggtacattaattgcaagctgcatgacaaaatttgtttttctggcaacaatctgacattattagtggaattccacaccaacagggcttgtgagcttccatttcatcttactgtaacttcaattttatggcaaaaaaaggtacaaagtttaaatacccctttctagtaatgccaaagacatacagtgttttacattctctcctttataggtaacaaaataatgtttagctcagtaagtactgaaataatgagtgaccaatttgaaggatttttagattatttaatctttgcttatgttgctttttcacatgcttaatgatggaaatgaaatgttaaatcaacaaaataagatccagtgtttcataacatttttataagtttggtaaactttagtcccattatatacttttggggacagtgttataaatcagaattttacgacagtttgcagaacactgatttgaaagcttcctatgcaaaatgagaaggggttcaaatatattaattatcattaagtattaaataataggcattagatgtctaatgtgagtataatttcatccaagccatctcagaaagtctaaaaggttggcagggggtcagctgaagacctcactggagtgggtcttaatttttaaaaagtgtctcactacatttaagacatgtgacacattcccattggtaacaattgctcaccatggcattgtctcaaaaaagactatggtggggagggtggcacattcctaatgggatgtacctctccccactccccttgcttgagaagcactactcaaaaatttaccagaccttacaactgtgataaaacttgaatgtgtatgatgaataaggccattcagttaactttacctccctttacccattgaaggggttccttttccattgctcagtttttagaaaataattctcatcttttttctaaagaaatgaatttgtggctggtctgaaggtagtgagttagctcaattgattgttcgcagtcagttatagatcaagctccttgttctactcttcccctcttctcactactgcacttgactagtcttaaaacaaagaaagaacgaatgaatgaatgaatctgtggctggatgcagtggctcatgcctgtaatcccagcactttgggaggctgaagtgggaggactgcttgggcccaagaattcaggaccagtctgggcaacagagccagacactgtctctataaaaaaaagttaaaactagctggttgtggtggtgcacacctgtggtcccagctactgtggagggtgatgtgggaggattgcttgaacccaggagttggatgctgcagtgagctatgattgcgccattgcgctccagactgggcaacagggcaagaccctgcctcaaaaaaaaaaaaaaaagaatttgtaattgttggtaggatgttatgggaaatttagaggtcttctgagtataaagtggtttaaatatttggtctgctgaagtctttctggaagtgttgttccccctgctgccccgcccagtagaaacttgctcatatgagaggttctgaggtaggtgcggtgtagtagaatggcattgtcagatatgttcaagaaacccttcatttgacactattttgtaccttatggtaccctttaacattttttaattaaaaaaaatattttttgagacagggtcttgttctgttgcccaggctggagtgtagtgttgcaatcttggctcactgcaacctctgcctgacaggcttcagtgatctttccacctcagcctcctgagtagctgggactacaggtgcatgccaccaagcctggctaactttttgtagagatagggttttgccatgctgcccaggctggcttagaattcctgaattcaagtgatttgtctgcctcaggctcccaaagtgctgggattacaggcatgagccacactgcacccagtccatgctaccctttttatatgaaacacctattaacacggtacaacaacacttcaaaacatattatttgaatttcggcctctgattttctagtcaacaatccattaaggcaaagacctgtttccaaactcagatgttctccaacttacactaatgtctggttttcttgaactatgtgagagaaaaaaataaacagaatttatttattatcataaagtcatcctgtttgccacttaatttggttatgttttatctaccacactgcaaatatgttaattcaccatgagaaacagatccctgtacacatgtgtatcagtaaatcattcaatgaatagttagtgcttaggatgtat

SEQ ID NO: 561 - DNA, 11692 bp, Homo sapiens
acttggcaccaaggctgtcaccctgttacctccgggtaagtggctcccctgtgcccagtattctgggactttgtgtgtgtgtgtttggtatcgaggaagcaggatatcccaggaagcagtgacacccccagtctgcatgcctgagtctagccccttgcactccccaccacagtgcccattcatcctggcaccccactgccctctcccccctgcatcacaccccagatgtctacccgcttcctttaggaggctgggacaagaatgcaagaaagaattgatggaggctgtgcaaagctggtggccgtgagagtctaaagtaaggggtggatcggagagcagctcggaaagtgaactcggtgtggtggcattggtgccactcagcggagcatgctgcctggcaccatgacaagggcataggttccttcccaggaagatgtaggacgagttctgccccatcgtggcttaggagtcttgagcaagtcatttaactctctaaacctcagttttcttttcttttttttctttttggagattgagtcttgctctgtcacccaggctgaagtgcagtggcacaatctcggctcactgcaacctccgcctcctggattcaagcaattctcatgcctcaacctcctgagtagctgggattacaggcacctgccaccacgcctggctaaattttgtatttttagtagagatgggtttcaccatgttggccaggctggtctcgaactgacccctggtgatccaccgcctaggccacccaaagtgctgggatcacaggcgtgagtcaccatgcccagcctgaacctcagtttccttactggtgacatggggacaataagaggataagatgagttcagaggagccatgtagggctttaggggaacagctgaagggatgctggtctggtggcgtttcatggagtccctcactgaagcttgaggcctactccctccaccatcctgggaggtgcacagtcacacacccatcttttagtaaatgaattaagcttcacagaggctaaacaccttgcctgggccaccaagtgagcatatggttgggacgaggctcaaacccaggagtgtctacctctagggccatgccctccccatggtactacactgtgtcttgagctgggtggggcagttgaggctgtctaatctccctgggcttccagttcccagccacaaagtgtcgggacaggtgagactccaaaggttcttcttgttctgattttttttcttttttttttgagatggagtctggctctgtcacccaggctagagtgcaatggtgcgatcttggctcaccgcaatctctgcctcccgggtttaagctattctcctgcctcagcctccggagtagctgggattacaggcttgtgccaccacacctggctaattttgttttctttttttttttttttgagacggagtctcgctctgtcgcccaggctggagtgcagtggcgggatctcggctcactgcaagctccgcctcccgggttcacgccattctcctgcctcagcctcccaagtagctgggactacaggcgcccgccactacgcccggctaattttttgtatttttagtagagacggggtttctccatgttgatcaggctggtctcaaactcctgacctcaggtgatccacccgccttggcctcccaaagtgttgggattacagccttgagcccctcccttgttctgataatttattggacatccagacctctccctacctgccctgcctgcctcgggcatctaccagaacccctggaagccccacagcccctgcagactgtttttatccatgaatggtccccccaacacatgcactcaagtttgaaacccaagtgttatcctagacaatccttccttttcctcaaccatatggcatcagagctcagcaaatggaatcctgagtaatcctcaaatccatcctcttttttccatcctaacttcctccacctctccatcctagattccctaccacaggcttcccaccagttctgccacatgacttactgcagccagagtgatttctttaaggctccaacctggccaagtcacccctctgctttgacttcatctctgtggcttccagggcttgaaatacccttctctgcccagtttcctccctgtcaagcccaactccccttggtcagcctaactcagcacaaggggcacctccttcaggaagttttctatgacttctgctctccactgtggcctcggtagacctcctccatctggacacttatcacctgtgtcataattgcctctgtctctcaaggctagtgtgagagttccccaaggcaacacctgtatatagtttttcttggtatgcctgggatggggcacctggtatatagcagggttcgatgagggatggatggatggatggatggatggatggatggatggatgaattgatggatagatggatggattaatgaatggatggatggatagatgagtggatggatagatagatgggtggagggatggatggatggatggatggatggatggattagtgaatggatggatggatagatgagtagatgggtgggtgaatggatggatgggtggaggggtggatgcatgggtgggtaggtggatgggtggatgggtagatggatgaagggtggatggatgaataagtggatggatggatggatgatggatagatgggtggatgagtgggtagatgggtgggtgggtgggtggatggatggatggatggatgagtgagtagatgaattaatgggtaggtggatggatggatacctgaaacacctcccttggggctgagttcctctagcttaagggtctggttcctgctagatggtgaagacttgcatgtgcactgccaggcgaggtggctcatgcctgttatcccagcactttgggaggccaaggctggcagatcacctgaggccaggagttcgagaccagtctggccaacatggtggaaccccgcctccactaaaagtacaaaaaaattagctgggtgtggtggcgtgcgcctgtaatcccagctactcgggaggcagaggcaggagaattgcctgaaccagggagttggaggttgcagtgagccgagattgtgctgttgcctggacgacaaagcaagattccatctcaaaaaaagaaggagaaggagaaggagaaggagaaggagaaggagaaggagaaggaggaggaggaggaggaggagaagaagaagaagaagaagaagaaggaagaagaagaagaagaggaagaagaagaagaagaagaagaagaagaagaagaagaagaagaagaagaagaagaagaagaagaagaagtagtttactaaaagcccttacatccgtaactttctaggattctagaatcacatgagatcatgggtaaaaagtggcctcatcctccccgcccccaccatttcatagatgaggaaatcaaagcttgggaggagtgagcaagttgcccaggctcatacagccagtttttagcaggtcagggactaaaatatgtcactacaccatagctgcccatcttgggcctatggtttgacctaaaattcagttcagaccttagtaagaagacacaggattttttttctttctttctttgtgtgtgtgtgtggtctacttttaccctaattagggccatcagatccagtgccccctttctgggacccttcctcaggtatttaaagtcatttatcttcagagatgacagcccccttcttttatttatttattgagagatggggatatgttatgttacccaggctagtcttgaactcctgggttcaagcgatcctcctgcttcagtctcccaaatagctgggactacaggcatgcaccccagtgtctggctaatttttcgtttatattttgtagagttgaggtttcactatgttgcctaggctggtctcgaacacctgagctcaagcaatcctcctgcctcagcctcccaaagtactgggattacagatgtgagccacatcgcccagcctatgaatatatatatatatatatatatatatatatatattttttttttttttttttttttttttttttttttttgagacggagtttcactcttgttgcccagtctggcgtgcaatggtgcgatctccacttaccacaacctctgcctcccaggttcaagagattcttgtgcctcagcctcccgagcagctgggattacagtcatgtgccaccacgcccagctggttttgtatttttagtagagatggggtttctctatgttggtcaggctggtcccaaactcccgacctcaggtgatctgcccaccttggcctcccaaagtgctgggattacaagcgtgagccctggccctcatatttcttaccttagggaaatcttgtattactataatatatatatatataaagttccttaaagtcccttattaaagagggtgaccataacaaaacatttaaataaaatgagaaatgttccttcttgtatcatggctggtggtcctacacttggggagaggccgctctggccaacacgctacttctcagatggagaaaccgaggccaagagagggacagggtctgtgctggagccatcaggggttctaagagcctcacactgctgtgggtcacctcccacccaccctccagcctcctccacacatgctgtttctgcccctgccaggttcccacttctactgcttccctcttcctctttctaattttttttttttttttaaagagtccgggtcttgccatgttgcccaggctggacttgaactcctgggctcaagcaatcctcccacctcggcctcccaaagtgctgggattacatgtgtgagccattgcacctggctctttctctttttacctaaccactccctttctttttttttttttttttgagacggagtctcactctgtcacccaggctggagtgcagtggtgcgatctcggctcactgcaacctctgcctcccaggttcaagcgattctcctgcttcagcctcccgagtagctgggactacaggtgcgtgccaccacgcccagctaatttttgtatttgtagtagagatgggctcccatttcgggagctaagtggccctgtgatggtgtctgctcacttatccttgcaaggcatcagctcttccctcgtaaaacagggttggtaatccctgccttaacaatttccctgtatagagcataaagattaggagttttggttgggtgaggtggctcatgctggtcatcccagcactttgggaggccgaggtgggcgaatcacttgagattaagagtttgagactagcccagccaacatggtgaaaccccgcctccactaaaaatataaaaattagccaggcatggtggtgtgcatctgtaatcccagctactcgggaggctgaggcaggagaattgcttgaacctggggggcggaggttgtagtgagccaagatcatgccactgcactccagcctgggtgacaaagagagactgtgtctgaaaacaaaacaaacaacaacaacagcaacaaaacattgggtgttttggcccagtgcggtggctcatgcctgtaatcccagcactttgggaggccgaggtgggtaaaacacttggggtcaggagttggtgaccagcctggctgacatggtgaaatcccatctttactaaaaaaacaaaaactagctgggtgtggtgatgggtgcctataatcccagctactcaggaggctgaggcatgagaattgcttgaacccgggaggttgaggctccagtgagctgagatcaggccattccactgcagcctgggtgacaaagtgaaactcttctcaaaaaaaaaaaaaaattggatattttgtgttttttaaggccttggaaaagcccttaatgggtattactaatctggggtgaagcaccccaccccacacactcccacccaatgaccttctgctcgcccactcctgttgcaacatggggatggcaggcatccccgccctatttaccccagcctcactcttctcctgagtgctgcctctgtctgaccatcctttctccccccaacttcctcctccccacacaccacactcccggcacccactgagtgagaaaatgcaggcagtcaaccggcatcccctctgaatcactggggagcaaaaattagaagagctgtcataagacatcatgatgagctgggcacagtggctcatgcctgtaatcccagcgctttgggaggtcgaggtgggaggattgcttgaagccaggagttggaaactagcctgggcaacataggggtaccccatctctactaaaaatttaaaaaattagctgggcatggtggcgtgcacctgtagtcccagctactcaggatgctgaggcaggaggatcgcctgagtccaggagttggaagctgcaatgagctatgatcacaccactgcactccagcctgggcaacagagtgagaccttgtctcaaattttttttttttttttttggccaggtgcagtggctcacacctgtaatcccagcacgttggggggccgaggtgggtggattacctgaggtcaggagttcaagaccagcctgaccaacctagtgaaatcccgtctctactaaaaatacaacaattagcaagacacgatggtgggtgcctgtaatctcagctactggggaggctgaggcgggagaatcgcttgaacctcggaggtggaggttgcagtgagccaagatcgcgccactgcactccagcctgggcgacagagagagactccgtatcaaaaataataaataaataaataaataaaattttaaagaaaaaaacctctgcatgtataaagggccttcccatgacttttctcacttaatcctccctaattgctctgccagcagaggataattactgttggctgatggggaggtgaaggcagacaggggcaggtgccaggctaatgaagccctgagttgggctctcagcatttttcactctgtaagcataggcagtgagatcaggtgctaccagcctccccgacttcagtcttgcctccatcaggggacccgccttgctgacttaccttgtgtacacgcaggctccagttgtgctctgtgggcaaaacccacacaggagtccctggtccagaggaagttgtttcagagttgatccatcatctattcattctgcaaatgctggccatggcacaggtgatttgctcggcacttggcgggtatataaatttatctcaaggcgttcaggtcaagcatgagactgagacgcagacacccagctggccaccaagtgacgagtaccactgtgctcccactatgccactgtgtgggtcttacatcggtgtgtgccctggaatcccagagcagggaggttggagaaggcaaatggagagaaccgtagggaggggttgggtatgggagtgttggagacagcacaaatctttcttatggttaggcataattgaagcctgtcagtagcaatatgaacctgtgatcaattaagcagctgaccaattgttacctcctcctccttgttcttgttacccaataattacaaagggctgtagagcctccgtggcagtcagccacatgggagtggcaggtgaagggagtctctgatcatgaggtcctgacctgggatcctggaatcgggggtggagtgaggtgggagccatgtcccactctgcctcataaagttgcctcagtcccttacaactgaactggacgttatgacttacaggcttccgcgtagttgccagtgccttctgtcctccaacctcagtgcagctgtcagctatgagtccctcctgaactttcctcctggcacaattggccagttttcccgtggtttttttgttttctttttattttttttttaaagacggggttttgctatgttgagcaggctggtcttgaactcctgggctcaaataatcctcccaccttagcctcccaaagtgctgggatgacaggcatgagccacctcacccagcctttctttttttttttttttaagagacaggattatgctctgtcacccaggctggagttcagtggtgctcacctagctcactgtagcctcaaactcctaggctcaagtgatcctgccccctcagcctcccaagtagctaggactacaggcgcataccaccgtgcctggctaatttttctatttcttttggagacagggtcttgctatgttgcccctgctggtctcaaactcctggcctcagtcaatcctcccgcctcagcctcctaaagcattgggattacaggcatgagccaccgctcccggcccctggtttctcctatgtttcccttcctcccacccaccacccccataccttgtcctgggtcagggtccccaaagcagacccttggcagggattcatgggcttgtggtttattaagagatgcttccacgagagaccatcgggggactgggaatctggtcggcgcgggaaggggccaagcaaagtccggctgcacagagagtcacagatttgaccgagttggaaactcaggaaacagggtaggtcatgctggatctggagtcggcatccctctggcagacattggccacctcagaggatgtgaatttccaggcatttcccacttccctagaatcttggtgactaagtggctccggcaacttgagggtacaggcgatggctgttgggacttcaaggccaccgagagctgatggaaagcggtcctgacagcatctgctttgctctgtcaagacttgtcatggactgattgattgattggttgattgattgattttaagacagggtgttgctctgttgcccagcctggagaggcagtggtgtgatcacagctcactgcagccttgaactcctgggttcaagtcatccttccacctcagcctccccaagagctgagactacaagcctgcaccaccacgcctggctaatttttttattttttatagagatagggtcttgctttgttgcctaggctggtctcaaagtcctggcctcaaatgatcctcccacttgaaacttccaaagcacagggattacaagcatgagcccccgtgcccagctgacctctcattgtctgttacacacacttgatcacaaatctgtctccccattagagtcctcccagtgcctggcacagaccacatgcctaataaataattgggtgaatgaatgaatgaatgaatggaagggagaagatagggatgactctgcccattttcagctgaagtaactgaggctcagggaggtgagtgacttatccaggatcccacagggagtggccaacacagccaggatcccatgggccttctgacaatgcatccaacacctttgaacttggcctaggtggggtgatgtcccctcccccagttctttcgttcggagcccaagataacccttgactcagctgggcaacaacgggacaacaacttcctctttccagaccacaggcctcaggattttcaaggaagcgtggagggggctcgggggcgtgtttccttctagttgccccataaagggcagagggagggagtttggggtactctgcaaggacccgagctatttatccctaggtcctttcctcctgcacgtcagctttgagccccgagctggtgcttctgctctctgagacatggcaggcctgatgaccatagtaaccagccttctgttccttggtgtctgtgcccaccacatcatccctacgggtaagacctccgacaggatgcagttccaagggcatggctgggatggcacagtggggggtgcaggactgaccagcctggggctggagggaagcgctggggaaagggtggcccagtgaatggactggcggtgtttggtgcagggttcaagctccagctctgaggcccagagccaaggggaggctgggaaaagacgtggctcttctctctctcctcttctaggctctgtggtcatcccctctccctgctgcatgttctttgtttccaagagaattcctgagaaccgagtggtcagctaccagctgtccagcaggagcacatgcctcaaggcaggagtgatgtaggtatccttcatgggcacgtggcaggagaggggtgggggcaggtgcaactccagggtccctgagaagcaaggtcagccagccccagctctgtgcatccctggagaagtcacctcccctctctggtcctcaacttccttgcccataaaactaggaggaggatatatttatttttttaatttcatttttctttttaggagatagggtcttgctctgtcacccaagctggagtgcagtggcacgatcatagctcattgcattgcagcctcaacctcctgggctcaagtgatcctcccatctcagcctcccaaagtggtgctaggattacggccatgaaccaccacacccagccaggaggaggattttttttttttcccctgagacagagtctctatcacccaagctggagtgcagtggtacgatcttggctcactgcaacctccgcctcccaggttcaagcaattctcatgcctcagcctcccgagtagctgggattacaggtacgcaccaccatgcccggctaatttttgtatttttaggagagacagggtttcaccatgttgaccaggctggtctcgaacttctgacctgaagtgatctgcccatctcagccttccaaagtgctgggattacaggcgtgatccaccaggagaaggatttagattcaatatctactgagcaccaaatatataacaagtcactattcaggggcacaagacaatatcttatctaattctctcaacaattctatggggtagcgatgattgttcccattttacagaggacagctgaggctcaggaaggtaacttgctcaaggtcacgtgggctgacatgtgtctgtcctccaaatagcttcataagtagtaactgtgaactcattttgtaaacagaggcatgaaatagaaatacaataagaaggccacgtgcagtggcttacatctgcaatctcagtgctttgggaggctgaggcaggagggttgcttaaggccaggagtttaagaccagcctaggcaacatagtgagactccgtttctgcaaaaaaataaaaaaaattagctgggcatggtggcatgttcctgtagtcccagctactcaggaggctaaggcgggaggacagcttgagcctgggaatttgaggctgcagtgagttatgatcgccactttattgcagcctggacaacagagtgagaccctgtgtcaaaaaatgaagatgacatcatctcagcaacttgcaaggaagccttactgtctctgggcgtccacatcccccccgccatgaagtggagtggcccaaggtccctgtcgacctcagctgatcccctgtccctttcttccacagcttcaccaccaagaagggccagcagttctgtggcgaccccaagcaggagtgggtccagaggtacatgaagaacctggacgccaagcagaagaaggcttcccctagggccagggcagtggctgtcaagggccctgtccagagatatcctggcaaccaaaccacctgctaatccccgcccagccctccagccctgagtttgggcctgagctgcttggcgggctactcggggcctggagaagccacagtgatggggggaagagctaattttcctgtttcttagcaacactctccagggatgtg

SEQ ID NO: 562 - DNA, 32460 bp, Homo sapiens
cattggacttcagcatgactactcagttgccagcttacgtggcaattttgcttttctatgtctcaagagccagctgccaggacactttcactgcagctgtttatgagcatgcagcgatattgcccaatgccaccctaacaccagtgtctcgtgaggaggctttggcattaatgaatcggaatctggacattttggaaggagcgatcacatcagcagcagatcaggtaccatctctaccatctctccagtgtactggattctatgagaaaggagggggtcctaggagacagggccactgtcagggtcagttacacttttagatgatatatgtatcagagtagccaagaacctttattttacagttagaattctactttcctctcaaaattagagcaaggacttccctaaaagtaagaacaaagttaagaaaagaacaatttgctcattatcaagaagcagcagacctttgaggaactggccataaattcaacatctttgttccccttttctggtacagatggaggatggaggataaatgggtcagggactaggtgctattttcagagtattagtggccttcatgtactcatgtgctattaaggctttgcaggttttcgaataaatttataatctgaaaacaaatttaagttttcaattccttgccagcatgcattatatacttcacacttcattctaattacaagataaaagtatatgtaatgcattgtgagtccttaagtttagtgaaggtttcagtttgaagttaatcatacagtataaattgtggtttacacaaatattattttaaaagctattgatcgattaggtgtagaccaggaatacatgaagtgtgataaaagtcatggataaatgtgtattacatatatctataaatatatattcttttgtgttgttgagttaaggtctcactctgtcacccaggatggagtatagtggtgtgatcacgtctcactgcagccttgacttcccgggctcaggtgattctcccactacagtctccagagtagctgggaccacagatgcatgccaccgtgcccagctaagttttgtattttttgtagagatgggattttgccatgttgcccacgctgtacttgaactcctgacctcaggtgatccacctgccttgggctcccaaagtgctgggattacaggcatgagctaccgtgactgccctatattcttatatatactaatatttaaaaggttatcaggagttctgatgttctttttcatccttagtccaactatttccttgaaggtcacagagctttttaaggtgactctctaattggaaggtgcccaggttagctcaggcagtacttgtaggcatgggacagttcaagtaaccagtttgtggctcctctttttctgagaagcaggaatcatgtttgcaggggaaagctagggcagaggaggaaataaacagaatatttaagttattaatcagtcttgacacaggcacagtcatcagcgaaagttcaaggagaggcttggttccaggataagctaggtttatagttaacgactgccataggaaacaacaatggcaggattagaaaattaaaatgcttgactaagccaggtgcggtggctcatgtctgtaattccaacactttgggaggctgaagcaggcggatcacctgaggttgggagttcaagaccatcctgaccaatatggagaaaccccatctctactaaaaatacaaaaattagccaggcgtggtggcagatgcctgtgatcctagctacttatgaggctgaggcgggagaatcgcttgaacccgggaggtggagattgtggtaagccgagatctagccattgcactccagcctgggcagcagagcgaaactccatctgaaaaaaaaaaaaaagagagaaaaaaaaatgcttgactagaagcccaaacctcaccattatgtaacatatccatgcaacaaacctgcatttgtaccctttgaatctaaaattagaaataaagaaaagaaaagaaaaagaaaaagaagtgacagtgcactgaaaaaaaaggaaattaaaatgctttggaaaagaaaataaattataaaaatatagaaaacaaaataagatttaaggggtgtgggggaagcccaaatagttgttactcagccactcagctcctcagctcctcttgcaggcccccctttggattaagttgcatttttaacagggtgcgcatattattgtgactccagaagatgctatttatggctggaacttcaacagggactctctctacccatatttggaggacatcccagaccctgaagtaaactggatcccctgtaataatcgtaacaggtaaagaaacaacttgtgaaaaattcactagtaaacatcaacttgatttacctgggaaaactttgttgatgatcattgcatagatccatgatcaattcttaagtttcagtatagcttatttttcatctactatgggtatatttactgggagagcaaatatgaattatgaagtcacagaagtcagagctagaaagtagcttagaaatcatcacattcagtgtgaacatctctggtctctgactcctcaccagtgaacagaaaaatatttccctgtgtaggtctgtgatttgaaaactatatgagtaaatggcaaaagagagtcacatcagtttaagattaatagttttcctttctcattgctaagatagctgatgaggttaatgtagtaaagtccttaaagtgtaagctgattgtaatctaagaggtgatatggcaggattttaagtggtttaagtcaggtctcggctacagagatattaagtgtggtgaaagcagcactattaattttaatgtaaggaaaccaatatcttatacacctaagaaaatcatgtcgattcacatacttctttctgaatacacatggctaaaattattttaggaattcctcttttggaactattctcaaaaccgcacaacgccagttagaatggtgatcattaaaaagtcaggaaacaacagatgctggagaggatgtggagaaaggggaactcttttacactgttggtgggagtataaattagttcaaccattgtggaagacagtgtggtgattcctcaaggatctagaaccagaaataccatttgacccaccaatcccattactgggtatataccaaaggatcataaatcattttactataaagacacatgcatgcatatgtttattgcagcactgttcacaatagcaaagacttggaaccaacccaaatacccatcaatggtagactggataaagaaaatgtggcacatatataccacagaacactacacagctgtaaaaaaggataagttcatgtcctttgcagggacatggataaagctggaaaccatcattctcagcaaactaacacaggaacagaaaacaaaacactgcatgttctcgctcataagtgggagttgaacaacgagaatacatggacacaaggaggggaacatcacacaccggggcctgtcggggagtcgggggctaagggagggatggcattaggagaaatacctaatgtagatgatgggttggtgggtgcagcaaaccaccatggcacgtgtatacctatgtaacaagcctgcatgttctgcacatgtatctcagaacttaaagtataataataataatactaaaattaaaaatcccacagaaactggctgggtgtggtgactcatgcctgtaattccaacactttgggaggccgaggcaggaggatcacctgaggtcaggagtttgagaccagcctggccaatttggcaaaaccccatctctactaaaaatacaaaaattagtggggcgtggtggtgggcacctataatcccagctacttggaaggctgaggcagggagaactgcttgaacctgggaggcagaggttgcagtgagccaagagagtgacactgcactccagcctgggtaacagagctagactctgtctcaaaaacaaacaaacaaacaaacccacaaaaactacttacagagacaccttgattttgacaaggtggattttgataaattccagtgttatttatcataatcatttactctattcttatttaattgtaccataattatttcttatttaatcatgtcatatgtcagtgcttcagtttctaaaaggcaagcactctattatcacttccactatgaattgaattgacttatttctgaatggcctttccctagaacctcatctccaagggcctcctgaacatccccacaaggatgtcccattcacttcatttcaaggaacacggttgcccatttatgttttccatcaactaatgatgtctgaatgtcttgccttaattctctctgtctctctctctcttttttttttttttgagagagagactctgtgtcgcccaagctggagtgcagtggcgtgatctcagctcactgcaacctctatcccccaggtccaagcaattcttgtgcctcagcctcccgaagatgacaagtgtgagccacaacacccagctagttttttgtattttcagtagagatgggtttcaccatgttggccaggctggtcttgaactcctggcctcaagtgatccacctgctcggcctcccaaagtgctgggattacaggtatgagtcatcacgcccagctgccttaatttattaactctgcaaattttttttgagtacctattatgtctaaacattgttctgggcaatgaagtgaacaaaacagattaaaaattcctgtccccttgaaatttatattctagtgtggggaggtaataaatgttttaaaaagataattatctatctatctatcatctatctatcatctatctattatctatctacctatctttatataggtatctttcatctgtctacctatctatgatatgaggtggaagtaaatgttatggaaaaaataaagtggggaaggtgaatagggtggcaagcgtggggctgaaattttaaaaggtcgtctgagggcatcacagtgagatttcagcaaagacctgaaagaaatgaggcaatagatcatgtgagtatctgaaaaaagtgcattccaggctgaaggaattctaaattccaagatcctgtggtcagagtatgtgtctaacctatggaacagaaaaagggttagtgtggttacagtgatgtgacagaagaggagaaaagtaggaaatggaggcagaagggcaggaggagcgcaatgttgagaatagactccagggtataggtcaccaaagaagcagagggcagttcaaaagctgttgtgatcattatggcatagagatgatgggtctgagaccaagaaatggtagaagtttaggtattgagaagtggacagattccgaataaagtttgaaagtagcactggcaggttttgttgaaagactggatgtaggatgtgagagaaaaggaggactcaatatccttccctgctctcatagaatcagatctcatcttattgagtatgtttgaagtatgcacatagttgattgctttctcttctcatattcaccaaacttttgggacctacatcacctcttagactgagcgttaaaggaacaggctctcatcacttttcttttttatttaatttatttagcatttatatgtcatatcgttccagaaggatttgaagtttctaattatatctaatataattaaaaataggatactttagttctaacaacaaactagaacccatatgaatagaggaagcagttgttatgaggcatcatggtaaagagctgctcattacaactggatgttaagtatagttctaagagtttctgagcagctaagagaagtacaattttgttcagacactttgattgcatcatagaagaaagcttgcatatttcttcagagacaaactatgtctaataacctaacttaaagatgaatttacttattcaactgtttttgttaattattttatttttaactttcatgggtacatagtagatgtatatatttatagggtacatgagatgttttgatgtttgtacacaagcatgcaatggtaacaatcacatcatgaagaatggggtttccatcccctcaagcatttatcctttgtattacaaaccattcaattatgctcttttaggtatttaaaaatgtacaattaagttattattgattatagtcaccctgttgtgctattgaatactagaccttattcattcattctaactatttttttgtacccattaatctcctcactttctccccactcctcccctaactacccttcccagcctctggtaaccatctttctattctctatctctatctccatgagttcaattgttttgattttcagatcccacaaataagtgagaacatgtgatgtttgcctttctgtgcctaacttacgttatttcacataacctaatgatctccagttccattcatattgttgcaaatgactggatctcattctttttgtagctgaatagtactttattgtgtacatgtaccacacggttgtttccaaattttggctattgtgaacagagttgcaataaacatgaaagtgcagatatcttttctatatactgattttctttttgaggagtatatacccagcagtgggattgctggatcgtatggtggctctatttttagttttttgagaaaccttcaaactgttctctacagtgactgtactaatttgcattcccactaacagtgtatgagggttcccttttctccacatcctcaccagcatttgttataagtcattttaacaggtgtgagatgatataattgtacttttgatttgcttttttttttttttgagacagagcctccctcttgttgcccaggctgaagtgcaatggtgccatcttggctcactgcaacctctgcctcctgggttcaagcaattctcctgcctcagcctcacgagtagctgggattacaggtgcctgccactacacccagctatttttgtatttttggtagagacggggttccaccatgttgtccaggctgatctcaaactcctgacctcaggtgatcctcttgcctcagcctccagaaatgctgggattacaggtgtgaatcaccatgcccggttgatttgcagttttctgatgatcagtgatgttgagcaacttttcacatgcctgtttgccatttgtataacttcttttgagaaatgtctgttcaaatcttttgcccatttttggattggattattagattttttttcctatagagttgtttggacttcttacatattccggttatgaatcccttataagatggatagtttgcacatattttatcccaatctgtgggttgtctcttcactttcttgatagtttcccctgctgtgcagaagctttttaccttcatgtgattccatttgtccatttttgctttggttgcctgtgcctgtggggtattactcaagaaatctttgtccagaccaatgtcctggagagtttccccaaagttttcttttagtagtttcatagtttgaggtcaaatatttaagtatataattcatttttatttgatttttgtatatggtgagagataggggtctactttcattcttccgcatatgggtatctggttttcccagcaccatttattgaaaaaactgtcctttccccaatatatgctcttggcatctttgttgaagacgagttcactgtagatatttgggtttatttctgggttctctcttctgtttcattggtctatgtgtctgtttttatgccagtaccatgcagttttggttactagagctctgtagtataatttaaagtcaggtaatgtgatttctccagttttttttctttttgcttaggagggcttctggatcttctgtgtttccacgtaaatttcagaatttttttttctatgtctgtgaagaatgacattggtattttgatggagattgcattgaatctgtagaatgctttggatagtatgggcattttaacaatattgattcttccaatctatgaacatggaatatctttccatgttttgtgtcctcttcaatttcttacatcaatgttttacagacttcattgtagagagctttctcttctttggataaattaattcctaggtattgtattttatttatagctataacaaatgctattcctttcttgatttctttttcagattgcttgctgttggcacagaaatgctactgattttttatgttgattttgtatcctgcaactttactgaatttgtttgtcagttctattagttttttggtggagtctttagggttttccaagtataagataataacatctgcaaacaaaaataattttcctcctttccaatttggatgcattttatttctttctcttgtctgattactttagtgagaacctccactactatgttgaataatagtggtgaaaatggacattcttgtcttttctagatcttagagaaaagctttcagttttccctcattcagtatgataccagccatgggtctgtcataaatggctattattgtgttgaggtatgttccttctatatccagtcattgagggtttttattatgaaggaatgttgaattttaccaaatattttttcagtgtcaattgaaatgaccatttggtttttgttcttcattctgttgatatgatgtgccacatcaattgatttgtgcatgttgaaccatccttgcacccttgggataaatccgacttggtcatgatgaataattttttaatgtgtcgttgcatttggtttgctagtattttgttgaggtttttttgcatcaatgttcatcagggatgttgggctgtagttttcttttttatgtgtctttgcctggttttggtatagtataatactagcctcattgaatgagtttggaagcattcctttctctattttttggaatagtttgaataggatttgtattagttctttaattgtttggtaaaattcagcactgaagcctttaagtcctgggcttttttttgctgggagatcttttattacagcttcaatcttattatttgttatctgtctattcaggttttggatttctttgtggttcaatcttggtaggctgtatgtgtctaggaatttattcatgtcttttaggttttccaatttatcggcatgtagttgctcatagtaatctctaatgatcttttgaatttctgcagtattggttataatgtctcatttttcatctctgagtttatttttcttctatctttttttcttagtctcactaaaagtcaattttatcttttcaaaaagaaactttttagttttttttggatgttttttatttcaatttcatttatttctgttcagatgtttattatttttcttctactaatttcaggtttggtttgctcttccttttctagtttaaaaaaatatatcattaggctgtttacttgaaggttttcttctttgttagtgtaggcacttatagctataaactttcctcttagaacgattttgctgtatcccataagttttgatatgttgcatatccattttcatttgtttcaataaaaattttaaatttcttcttaatttcttcattaacctgctggtaattcaggagcacattgtttaaattctgtatgtttgtatagttttcaaaattccctttgctattgatttctagtactattccactgtggtcagagaagatacttgatatgatctcaattttttttaatgttttaagatttgttttgtgacctaacatatggtctctccttgagaatgatccatgtgctggggagaagaatgtttattctgtagccattggatgaaattttctgtaactatctattaagcccacttggtctgtaatgcagattaagtccaatgtttctttattttttttttccttctggatgatctgtccaatgctgaaagtaggatgttgaaatctccagctattattgcattgggatctatctctctctttagctctagtaatatgtcctttatatatctgtgtgctcaagtgttagcacacttgtgtgctcaattgttatatcctctgacagaattgacctctttatcattatataattaatttctttgtctccttttatggtttttgtcctgaaatctattctgtctgataaaaatatagctacccctgctccttttgttttccatttgcatggaaatctttgctatccctttattttctgtctgtgtgtgtctttataagtgaagtgtgtttcttgtacacaatcgaccattgccattgattttttttcttttttatccatttagccactctatgtcttttgattggagagtttagaccatttacattcaatgttttattgttaagtaaggacatactcctgccattttgtttttttgttttctggttgttttgtggtgttgtcttcctttcttcctgtcttcctttttgtgaaggtgtttttctctgatggtatgttttaatttttgcttttcattttttgtgtatctgttgtaggttttttgatttgatgttatgcagcttgtaaataacaacttatagttcattattttaaagtgatgacaacttaacattgattgtataaactaacaagcaaagagaaagctaataaaagcttcatactttaacttcatcccccatacttttaatttttaatactttctatttatatcttatactgtctatgtcttaaaaagcttttataattattatttttgattggttcatcttttagtttttctactcaagatatgagaagtttacaccacaattacagagttataacactccatgtttgtctgtgtacttactagtgagttttgtaccttaagatgctttcttattggttattgatgtctttttctttcagattgaagaaatttctttagcatttcttataagagaaggcagtgggttcttttctggctcagggtgggtctagaaatgccatccaggagctaagtcctggaattgaggactttaggagtctgcttggtgcttcatgttactgtggctaagttggtacccaatttgtaagacaaagtccttttactcttccctctcctttcctccccatgcctccccatggctacaacagctgggaatgtgctgggtcacacctgaaaccagcatggtactgggtcccacccaagcctcgtggtgagtactgcctggctatcactgatgtttattcaaagcccaagggctctttagttagcaggtgatgattcttgccaggactgggtccttccatttaaggcaagaagttcccttatagcctagtgtatgtctagaaatatcatcagggagctagggcctgggttgggggattcagtactctacttggtgctttattttactgtggttgagctgttatccaagttgcaagacaaagtcctctttatgctcctgtctcctttcttaaggcagagggacggagtctctcaaagctgtgagctgtgctgcctggagttggaggagggttgatgcaaccactcctttgactactccagctggtgtctcactaggttatgtgcgctccaaggctactggttctgagctcagtacagcactaggacttgcctaggaattgtagtccttgtggcctaaatcagctgtccccaacgtttttggcaccagggactggttttgtggaagacaattttttaatggacagggtggagtatgctttctggataaaactgttccaccttagatcatcaggcattagttaaattctcataaggaacatgcaacctagattcctcagatgcacagttcacaacaggcttccattcctatgagaatctaatgctgcaactgatctgacaggaggcagagctcaggcagtaatgtcactcatctcctactgtgcagccagtttctaacaggccatggactggtactgccgtgcagcccaattcctaacaggccacagtccatggcatagggattgggaacccctggcctagactgcctttcaagtttatttagaaccccagagaactttatcccacattggtgatccttggtagaactcaggttctgactgctgggtaggacaattcctctctgacaagagctgttctaaatgtgccctctgtgggcactggctgaattctgtgccatgttgctttctgctgttacatggcaacactgacttccaatgtaaagtcccacaatcactgtactttccttcccccaagggcacaaattttctctccacaccatgtggtaacctggaggatgggggagagtggtattggcaattaaagactttctttcttacctccttcagtgcctctttccttgatatgattttaaaacaaggtactgtgattactcttctgatttttggttcttatgaaggttcattcttgttgtggatggttgttcagtttggtgatcctgcaggaagacaattgctggaaggttctatttggccatcttcctctgcttcctcctcatcttttatttcttcctcttgcctgattgctctggctaggacttccagtatgatgttgaatagaagtggtgaaggtgggcttccttgtcttgttacagttcttagaacaaaggctttcagcttttccccattccataggatgttagctgtaggtgctgacatatacgccatctatagcctttattatgttgaggtatattccttctgtataataaagtgcacatgtctgaattatatattacttgccttgagggtgccaagaaactatttatactgcctagaatattaacctttattatgcctaaagagttcattagtcaaatgttggttttgatgtagacctcatagtttaaaatttaacatttaaattaaatgggttataatttttaataccacctaaatacaatatattgatccaatatagaaagttagatcaatgttagaaataaagagtcacagtgtacctttccagacttgtcgttagcatttcatatttatagttttagctttgatttgaatgtttcacagatgaacttaaatcaacacataattccaccatagcataatagtaattaggcagtttccctaaatttgagaacattgccttaatgtagttgtgatgttttgaggcttcatagcttaaatccattataccattatggaatctatagagcagggctatggagaaaggcttcagagaagttttttttgctactataaccttatttaaagaaacaaacagaaaaaaacccaaacgtatttgaagtctgcttaaatattactgttaaatgtgaagtgtttatatctaacattcataatcatatgaatgtcaacatttagtttcgagtagaaaaagataaatcattactgtgagttaagaaatttaaatggagatgtgtgagggagcatgtccatttcatccttcccatctccaccctccccagagtttcatccccagggtgcccttcttggtttccagcctctggtgttctgcttggggtcttgacttcttcccatgccactcaggctcagccccagactagaacagggtttgggaagcagtggggatagccaagatgggtgtcagtgggtggcccagcagtttctgtcccaggagtggccacaggccaggggtagtggtggctgtgcatgtggccagcctgctgccattgtcccatccttgtcagggccctctctttcaccttacagcatctgaggggcagagctctagagggtttgggcagacaatgcctctgaaaatttttttttaaataaaatttagatgacaagtatatatcatatatgcagtgaccaagcatataactactttacagtcatctaactgctgtagcaatgatatgtaactacagtgtcaaaacaccctgacagttttcagaaacccaatgtggagaccatctgccatatcttactttttctttaggtacaatattcaaattcatattgattttgcttacatatgaatagtttcaaatttgttcacatatggtttaaactttttgtccctattgtcttactcaggcttgtgtaacttaaaatgagcctgagcatgggtctacacacagcaagatgtgtaataaaaacacaattttagtgctactttcaaaattcatgctattaagaaagatgctgttttcaaagctgaaaagatcatgaaatggctaacttacatatcagaggttggataattccttactattgaggtgttatattttctgtgtagtaaatgccttcaaatattaactgaaagatcagtgaagtcattttccccttcgtgattccaacttcattttgtttattttgaagataattaatattttaattgcaaaagaaaattatagcattggaaaattttctgtatatggagaataacaatgaaccaaatttaccaattagggaaccatttcaggaattgttggatggtgaatttttcttcagtaactatgctttagttgcaatgcagtatgcccagaaacaatccatttcaacttctgaatgtttgatttggaacatttgtttgatgagtattcagttaaacacttggatacaaactctttccagaaggtcacatctctaccatttatcttggaatgtttctgaagacattctactcattttattaactgtatacacttctgtttttggatctccaatatgattatagacaatatcaacatagaaggctttgatttagactccaaagtttagagcatttgatcttgacatgccttaaattgggcttccagtcaaaattgaggccacttctcctttcaaatggcaagttcccttgaatgagtgaatagtggagttgtagaaattgaaaggcagtagtagctttcactttacattacaacttctccaatgcaatcttttccattctcatcaagtctgaaaccgtgaacctatattcacctatttggaacacatcagttgccaatgggacatccctttcctcttctattgattttacagccgaatagaagaagctcagttcaacacatccaaggtgcttgggctgcaccttcatttaacacaggaatctgtccagtaaattcacagagaaaatgcctttgtgttaaagccaaagaactgaattagactaacatcttgtacttcaaagtcctgtagccttgcagtcattctgaggctattgtctatcatgtgcaaactcaattagtctcaaaccacagatctttaactgacatctagacttcagttccaacaaggcattcagctggtgtagcagtttctgacagtcaggtttcagtacctctatcatcttgatagtgattgagcctcagtggtaaccacccttcttgggcctgcactcacctcaccccacgaaatccaatctcagaggcctaggaaacaaagcaaacagagaggcccagggaggggaagccttcctgggtggatgtctctgcagagccaccaagatcatattgctctcatcagggtcagcttggagctgaagggctgaaaaggcattttgatatttgattgcatattatttcatactgttatttcagagttttgtgtgcacacattgtttcttcagtaagcctaatgctttataagcatagcaaccacatctgacatttctatgtctctcacattgtatgcttggacagctctgcctggaatattcttcccccagttgcccacatgtccaatatagtgctttgtgttgtgtcaaaacctaatgcatatttgttgaatatttaacatgtgctgattttagattagtaaatatctttccgataattgatgatttttgttatacctaaagattgaacactttgaaagcagccttagaaaatgcatttcaattattctctttcacctcctccttctgtgcccagggcaaaactctgcatggattaaggactcagcaaatatcatggatgaagcaacaggcagatttcaggcaccataagcaaactgaatttttaaaccctaaattaggacatgtggtctaattttggagcattttatgtatacgccaaacagcctgagaaatgtagcttgaattgaaatatattagaatacatgaagactaatagagtcagtaggaaaatatgtttgtcatcagaactgtttcagaaatccaaaacaccaacctacttattccaccacttaaggtgatccaaaaagactgggggtaaacatgtttcaagtggttcaatgtgttgtaatttatatctatgcatttcagatatcaattgaagcaaaggtgggttaaactattgaacggttgttctttcttacaaacacattgaaataataattttctatatgtattattatatccttttccaatctttttcaaggatatgttttatagatgattgctatggctttccttatattcattatacaaatttgtttgtagatctagtagccaatatttgatgtcaccaaatttttattcatacaacagttatctcagccttctcagctattcttcaataaccatttatcatttcagagttgtgcaatagaggataaatatagcaatatgttaaatattattttcaaaattgtattttaattgctttactgggacaattattggtaactttgtaaaagaataaaaaaatcaggcattaacaaatgctccaggatttccattgtttcatactagctggtactgccctagccaatccttgttacctcttatttgaacaatggcaacagcttcctaatgaatcccctgcatttagtctctcactgttccagtacattctacactccgtgttctatttatctttatgaagaaaattttgaccaggttgcttctgtcttcaaaggctttaatagtacctatttattactaaatttggaacaaatcttagcctcttgtgcaaagctcaatatccatccttccttccttccttcctccctgcctcccttctttctttctttttttaaaatatttttaaactttttatttttttgagacagagtctcactctgtcacccaggctggagtgcaggggcgcaatctcagctcactgcaagctccacctcccgagttcacgccattctgctgcctcagcctcctgagtagctggaactacaggcacctgccaccacgcctggctaattttttgtatttttagtggagacggggtttcaccgtgttagccaggatggtctcgatctcctgacctcaggtgttccactggcctcagtcttgcaaagtgctaggattacaggcgtgagccactgtgccctctcctctcctctcctcccctcccctcctctcccctcccctcccttctctctttcctttcttctcaaatctgagaatgtcttcatttctccctcccttttgaagggcagttctgatggatatagaattcttggttgtcagatttttttttctttcagtactttaaatatatcagctcaatgctttgtggtctccaaagttattgatgagaaatctgccgataatcttattggggatcccttgtatgtatgagtcacttctgtcttgctgctttcaagattctcattttgtctttggctctctacaatttgattatagtgtgtcttagtgtgagtctctttgaattcattctcttggagtttgttgagcttcttggatctttatattcatatctttcttcaagtttgggaagttttcagccattatttcttcaaataatctctcttctccttctgagactcccacagtgcatgtgttggacactcaatggtgttcctaaggctctgttcaattttctttaatattttttgttgttgttctgcagactcaataatttcaatggtcctgtcttccagttcactgtttcttttttctacatgcctgaattggtcttcgaatcctcctataaaatattcatttcagttattgtaattttcagctccagattctttttaggttttctatctttttattgatatttctactttgttttgttttttgattttctccacatcttcctttattttcttaagcttctgtaaaaccattgttttaaagtctgtgtttagtaggtctgtcatgtggtccttttcagggatgattttcgttggtttatttttcctttcttttgagtgagtcatactttcctgtttctttgtatgatttgtgatttttttggttgataactagacatttgaatcttatcacatggttactctgggaatcagattctctgggtttgctatgtttgtttgtttgtttgttttgttgttgtaggatgtttgtgttgaggatcagcttgagatgtaaatttaaggtcttcttagaccttttatgagtctgtacctttccctgggcatgtatggcgactttctaaatttccctgtatatttaattgcttattccttaaatgtctcactatccaaaggagaaaaagagaaaataaataaataaataagacactggttctttaaatctcctggaagccacttcagccagaaagagggcctgcaaaaatggtgtgtctgtatgtatacacaacaatagctgcttgcctttgcatttgtacctccatgatcagaagcaacaattagtgatcagaatgcagatctcgtatatttgaaagacaaggtcattattgtccaccctgctcccataagctgcctgcaagctgctttaggaacacagacatggcagcctgtcacagggacaggggatgaggaattggtaaccactattgagctaagagctaaaatggactgaaattaactgtaagttaccttccaagcattcttctggaagttgcaagcactagagctccaaaatagtaatattagacagattccaacagtgcaattgttatctaggtggggagaaaaattccctgctctgctatcttcccagcatccctctacctctaaatttttgttaactcattcaaaaaaatttttttttgagatggagtctcactcttgttgcctaggatggagtgcaatggcatgatctcagctcaccacaacctctgcctcccaagatcaagcaattctcccacctcagcctcttgagtagctgggattataggcgcacgccaccaggcccagctaattttgtatttttagtagagacggggtttcttcatgttggtctggctggtctcgaactcctgacctcagctgatccacccacctcggcctcccaaaatgttgggattacaggcatgagctaccacacctggccccccaaaatttgttttttgagacagggttttgctctgttgcccaggttggaatgcagtggaactcactgtagcctcaaaatcccaagttcaagcaatcatcccacctcagtctcccaaatatctgagactacaggcacacaccactatgcctggctattttttttttttttcattttttgtagagagacagtcttgctttgttgcccaggctggtctcaaactcctgggctcaagcaatccttcctccttggactcccaaagtgctggaattacaggcatgagcaaccacacccaccccaagatattttttaatgcctctcttctgttagacaaaattttagtaaacgggatatgtaagtcattgatctatgatatccacaggatgctgcagacattataagacaaacacgtaagtgaaaatatgactatagattacgataaatgctatgaagaaaaaatacgtggtctggaatcttatcctacagtaggttcctacaaccaattttactcaagcatgggcttcctctgaactcctttcttgtcttaatacttctcttctaattattgttatttagaatttacttttgcatatatcaaataataggtttaggcaactatcattcaggattttgttgagagttaagattgatttacaaagatttttttcctccaataaacatgtatcagatttggccagaccccagtacaagaaagactcagctgcctggccaagaacaactctatctatgttgtggcaaatattggggacaagaagccatgcgataccagtgatcctcagtgtccccctgatggccgttaccaatacaacactgatgtggtatttgattctcaaggaaaactggtggcacgctaccataaggtaaaattaatttgcaaataatccaattagttaatgcctaatgaaataaagtgggcaaggagaaaaatatgttattgataatgataagcacactttagaaatcgagtaggggcaaagcatagaaagtaatgataaagcgtggaaagctcctataaagaggcttaaggggttccgtgtacatataagaacacaggagtgtgttttcaggagtgtgtagcagtcagaaagtgccgcatgcattatgttgcctaatgttgccttttggactttgtccttttaaaggcataccctggcaatgggtcaaggctagaatgaaaaactgcttaccacatagactctgtcttgaggagaatggaacaaacaaagttccttgccaaggaaaacagttaagtctacttggcaaacagaagtaatctattttatgtcttataagattccagtgggtctttatagataaagatacccatgtacatatttgtaatgtggagactgaactaaaggcccagtttagctagaatggcctctgattctctaaagcaaactcatttcccatgaaaacactgatcatagatgaaattggcactaagatgtgagcttgtactttttcccacactgtgatgtccagatcaacttcctaaaataatttttttctctttatcttctgtttattgcagcaaaaccttttcatgggtgaaaatcaattcaatgtacccaaggagcctgagattgtgactttcaataccacctttggaagttttggcattttcacatgctttgatatactcttccatgatcctgctgttaccttggtgaaagatttccacgtggacaccatagtattcccaacagcttggatgaatgttttgccacatttgtcagctgttgaattccactcagcttgggctatgggcatgagggtcaatttccttgcatccaacatacattacccctcaaagaaaatgacaggtaatgtgtgatcttaaagatatgcaggctgatgtaatcagaaaagaaaagaaaaaaaaaacatgtttttctagctaacgcatactccttaatacaatgttttccagctcttaatttttgaacatctagctgttaatatgctatagaatcaatctcagtctaaattgttttgtagatttatttggttttatttaacttgatttttttttcaaaatatatgacttcttacatacaactctcccttcttggcttcttggtttcatactttaattgatttcctctcacttctctgtctttatcagcatgttttactgaaattaataaaacatataacttagagagagtaaaatgtgaatatgaggttaaaatagtaataacaattatgaaatccctttttactttccaatttcaaatgatgttttcaacttattacttccaggaagtggcatctatgcacccaattcttcaagagcatttcattatgatatgaagacagaagagggaaaactcctcctctcgcaactggattcccacccatcccattctgcagtggtgaactggacttcctatgccagcagtatagaagcgctctcatcaggaaacaaggaatttaaaggcactgtctttttcgatgaattcacttttgtgaagctcacaggagttgcaggaaattatacagtttgtcagaaagatctctgctgtcatttaagctacaaaatgtctgagaacataccaaatgaagtgtacgctctaggggcatttgacggactgcacactgtggaagggcgctattatctacaggtaatattttgatgtcagaagagttactggataaaataaagacactcagttaaatatacagtttagataaataatgaatgattttttagtataagcatatcacacttttggggatttatgtatgctaaaaattttgttgtttatttgaaattcaactttagctgggaagcctacaaatacaggctaaatttatttgctaaatcttttttttttttttttgagacagagtctcactctgtagcccaagctggagtgcagtggtgcatcagctcactgcaagctctgcctcctcggccaagcaattctcacgcctcagcctcccaagtagctgggactacaggcgagtgccaccatgcctggctaatttttttgttgttgttgtattttagtagagacagagtttcaccatattggccagggtggtctcaaactccccgagctcaggtgatccgcccacctcagcctcccaaagtgttgagattataggcatgagccaccgtgccctgcctatttgctaaaccttgaaaccttagatgtcagttcaattttaagctgattgggaaaaggcaggacatttacttgcagtagcagtattaaaaataaatattcaaattacagatcattataacaggagttcattgaaaacccattttatttcctgcctgaacaaattaagccattttccttatatgttcacaaatgcctatcttgctttataaagagtttgacactaagtatatcctggatatgaatggggttgaccaccaagatagttcaatggaatggtttattgctgcaaagatccaatctctcattgctcgcaagtggcctccatggtcctctcattcttctcttctcttccttggtctggcccccatcttatctcacttaacagggcttcctattgacagtctgacaatctcagctccatccagtcagttctccatattgtagttacagaaatcacaaaaagctgtttttgattataatactgtctggcttaaaattcttcactgacttctaattgacaaatcaaatttcttaacatgaaagacacacaaagtctagatgtgtggtcccttcctattctctatcctctaatctcacttctacttacaaatatcctgggcttctgcaatattgaaatattttcccatctcctatttgctagcatatgcagaacctcaaggtgtttgcacagattgtttggtcctttatccgtggcgagccccacctactaatctttcatagcacttttctggtgttatcgtcaccaagaggggttcctggatatttcccacagagctactcctacctctccagatgagttaagtacatcctttatgtgctcccaggacaccctatgcttagctttatcaaagacatattatgtcatagtattcacttacttatttgagactgagaaccccttgagtgctgaaattatgccaactgcacagtattttgtttgctctatgataactaccctaacaatactttttcgttttagcaaatgaaggcctactatatgccaggtatttatttagtgttaatgatatgaagataaataagcatagatcctcctcttgaagaattcagtctttagtaatggagaaagacatttgaacagataatttcagcataggttggcatgtgattgtccgtagaatgcacattttgctggaggagtactaaagagctctacttagattaatttgggaatgcagggaagtttctggagctgatgctattatccaggtgaaaaagagtaggaggggattctttgtggtgtgaagagcatgaacaagggtgtggatgcaggcaggagcagggtctgcagggaacagcaacaggtcagtgctactaaggcaactgaggcatggcttgcgaagctgggtttggtgggaaataagcctggaagcaacatcctgtcctgcaggatcttacctagcacacttaagattcagcctttattctgtgggtgatggtcagctggtggaagtggtccagtgaaggaatgatgtggtcagatctacctttgaatatatcatttttactactctgtagatgatggagcaaagacccaaaagactagattattaaaatagtcttattaagggtctggaccaagactgtgtttgttggaataaaagcagggcatggagtctagacatatttagaaaatggaactcagtggccaatttgatgtggaacaggaaaacggaatggagagtccagaatgtggcagatttctggcaagaatggctgggtgggtgagatgcatctgacagatcaggaggcaagagaggagcagactcactgacagtgggtagaggctgagttcagttatagatgtgctggttttgaagtagttatgagacattcagctggacccagccagttgtctgttgaatactttggtctgatgcttaagggagatactagaattagaaatattgtttcaaaaatcagcaagatacaaggggcaattaagcaaacaacagtgaatgatacgacaaaggagactgtactgacagtaaagaactattgacaaagtagaacctttgggagcttcggtatttggggcaggaaaggacagaggacaagaaacctgcaaatacaattaagaaataaaggaaaatttaaaaagagaacatctggtagatgccaaggaagtagagactcttggaggaaagaaatcatgaggtgtattaacacaatacgttgaccattattagcatttttgagtataattttggcagaattttctgagctcataatgataggatgatgggcagattatattgggttgaaaagtcaaagggaagtgaatgcacttttttccccaagaaatcttatctgagacaagaagaagagaagcaagacaatggtttaacagagactcatggtcaggagaaatgtgtgtgtatgtgtgtatgtgtgtgtgtgtgtttctcaacaaacgagagagccttgattgcctttgtaggtctaagagaaagagctacaaaaggaaaaaatacataaaatatgagaggaatcaggtccagtgcagtggcctgtaatcccagcactttgggaggtcaaggcgggcagatcatctgagatcaggagtttgtgacccctgtccaacatggtgaaacctgtctctactaaaaatacaaaaattagccaggcatggtggcaggcgcctgcaatcccagctacttggaaggctgagacaggagaattgcttgatcctgggagatagaggttgcagtgagctgaaattgtgccactgcactccagcctaggcaacagagtgagactctgtctcaaaataaaataaaatatacaaggaatcattactcctactcagtgttccaaggtgctggaggaaagagggaaaaatagtatcatgaacacaggtacaaaatgtccaacaactggaaattaaatgaatcatattgtagaagaacatttattgccataaaattattaccatataccatatgttatattaacatatatagccttatatatgtgacattcatatggtattatattgctatataaatttttaaaattaaaatataaattgtgatgtattatttttaagttaaaaaaagttggtcacaaaacaagagagtaatctcttagctcttcttccctccttttccttcctgcctcctcaatcttttcctacctttttacctcctccagagtcttggctctacctaaagagagttgtgggaagttctttcttagtgttgtgaggtaggttagctttgtcaagtaaaaccaagctttctgtttatcttgctagacggtgatatttcatctaaacgattggtaccagatatgttttggaatcttcctatttaaagataataatacatattacttgatattaccagcagagtctgggaaaatacccagaatcaaacatattaatatatctattggaaaacatgggattattcaccttaaatagcttgaataaaaatgttatagccttatgttaattcaagttaggtcttaatgccaatgtgccagtgggttacaaaaatcctttattttcagaagattttggatttttgtattgaagataaggaattttggtataatattatatttataatttttcatagtctaactgtgatgatatattatgcttgaaaaatctcgattatcaccaaaagctacctccaaaccaagggaagagacacaaagagaggtaaaagtgaaataaacccctatcttgccacacagattttccaagcattttatagcaaatatgcataattttgtttatatcagtatgtcattgcaaacatcactcagagttttgcttttatagtttttctttgtttttcctaaagttattaattgccttatttttttaaatttcgttaattttctttgactttttgttaaaaccccatatcttccaacagcatctcagaataatttttccacaatatcattttcataagtttatcttgagctaaaaataataacctttctctgcactggtttccctctagtcattctgcacagttgtcatattgagatttcctttactgtcatcctaggaatgctctcttagctatttccttgttttaggttctctgtttttctccttctacctttatttgctcctttgttctgttgtagtcaacgctgtctagtcacattgctctaatctgaactggctgctctccatgccttgtatacgataggagtcatcctggaatctccctttatcctcatggtgaagatttttctttaccacttccctgtgtggatttcctgttttctgttccccgtcttccttgttttgggcttgtgccctctttcttgttgttaacagtttccggaaagagagtgatcgggatgcaagatttttgagactcactggtctgaaactgcctttcctcttaaatttagttaagtatttccctgggcatggaattcaaaggtggttatgacttttcttcaggattgtgaatgtatttatatcctcccatcttacgttgctattgagaattctgaagttcttctgattcctgattctttgtatgtgtattcctcattccacaccttccccagaatgcatgcagaatttcttcctttctattttcttttctctttttctgaaactcttattattgggatcttctgcctcttggattagggctctaattttccgacattttctctgctattttttactactttatttttctcctctactttctgagagatttcctcctcttgatcttccaaatcttgtactgaatcttttatttttgttaacatgttcttaatttccaagaactcttttttcttgtcttcggagtttcaacacttattgttgttttgtgcatgtattattttttcttctctctctgaggctatttaggaaattttttattgaagctcctcccccctgcttccttcaagttgcttttatctgcttttttatttgctttttcatgcaataagtttttctcacatgtctggtaactcttggggattaccaaaaactcatagaaaattctgaccatgtgagtaacacttgccaattttgagcttcatgatagaatgatctagctggaccttttgctgcggggaaatcggaggtaagtgtctttggagacttcctcttgggatggtcaggtctcccaggtttcaagattcttctaatttccttcttgaatcagttgcctaatttaggaaataaaaatacaggatctccaggtaaatttgaagttcagataaactttgttttttttgagagagtctctttctgttgccaaggctggagtgcagtggcatgatttccgctcactgcaacctctgcctcccgggttcaagcaattctcctgcctcagcctcccgagtagctgggattacaggttcatgccaccactcccagctaattttttatatttttggtacagatggggtttccccatgttggccaggctggtctcgaactcctgacctcaagtgatccgcctgcctcggcctcccaaagtgctgggattacaggtgggagccactgctcccagcccagataaacattttttttaaaaagtgtaagtatgtcccattcaatatttaagacatacttatactaaaaaattatttgttgtgtatctgaacttcacatttaactgggagtcttgtcctgtgttttacctggcaaccctattcctgaaagataaatccttgctgacagcattagggatccaagtgaggaaaatggccttgcaaggtgtgggtgggggtggagggggaacgttttcaacattcagtgttatttattcaggtaatccccttcaactatgtctcttaaactttcatctaaagaccatccactttaccctctctggaaacattctccgttatttactggagtaggggaggatcagttatctggttttttggaggacttagtatccaaggcatccttcacaactttctgctcatttattttcctttgactgccacaactttactcctagctctaggtatagagcagtcccagtgattaatttgagtgctttgcagtgtagatagggattcttggctctttctactgctagtttaggacctggttttcttgggtctgctgaatcaattactactttttgtatcaacatcctagtttttaaaactgtgttgtggtctatcctcctattttcctacctttgtgggttaaaaaaaatagtgttcttttgaaggattgtaggaaataaaattgaagcatatgttcattctacctttacctgaaagttacttctatcccatcttaatacacttgcactgaagtgattactttccacctgcaaagtggaaacaataagaccagttagcggctgctgctttagtcaagcaagagatgaaggtgacttggaatatgctgtacagatggcattaaatgaatatggatctccttttggaaacttttcatctgcatggtgagatgactcacatacttagattttatattcaaatagctacgtactatagtggaagaaaaacttaatggagaagtgtttcagttcttgcgcagtatagaggatatgacttttccagattacaggggttgcctctaggtcaactctagggctcattacaactctgaagctcttttattgtgtgaaacaggcaataagatatgatttacacaggtgcctaaattaaacctttaaacacattttaaattcttgataattaaaatcattagtaacttgagaacaatgaagatatagctgttcatggctataggccaaggatctgattgcttttacagggctaatctttttgacagtgaattgcaggaggcactggggcttaaagccctttatttttattattagttgtattaattattcagtgataaactggatgactctaatgaagaagtaacattattttaccaaataaagtggcataggcatttttctagatcaagagagtatttcagttgactttctcatgttttttttttaagagcatctagcagtttatttaattattttattctattttttatctttaaaatttatcctagctttattgtcattaacaaatgaaaattgtatatctttacagtgtatgatgtgacgttttgatatgtgtacacaccgtgaaatgattaaatcaagcaaattcacatatcccacatgactttcttatgacttactggttttcatgacttccctagatttgtaccctgttgaaatgtaaaacgactaatttaaacacttgcggtgactcagctgaaacagcttctaccaggtttgaaatgttctccctcagtggcactttcggaacccagtatgtctttcctgaggtgttgctgagtgaaaatcagcttgcacctggagaatttcaggtaagaatcttcgaatattgccaattagtttcatgtaagaggaagcactttttgatataaaaatctgctcaagtgcttacaaatatcataaaatttccatttagaaaggttaagattatccttggggatcatgaaggacattgagcaggctgcatttcttgtctggaaattcttaacataataattactgtgtccttcagaataaaaaaatatatatcttattttggggattatagggagtttaaagtcttccaagtagaaagaagattcaacgagagtagtttcagaaccagtgccattggagccccttaggaccactggggagtgatggcctagggaagttgaaaggagtccctctcgtcgagtgagtcaaggctctgtgtgatggtagaaggaaaagagacaaggaaaagctgaagaagagagaatttgacagtggcggatgttagcaaaaaagcaaaaactttttaaagttcagaaataatcccttgcttcacatgtgctctgcccagccacattctttcgctgacttcctgcaagttctcctcccactccccgttcctggtagaaaccactgctggggtgtgggaggacaatggaatggtgaggaggttgtggtgagcaagagacaggagatgacagatgctcagttcaaatccctgttagtcaattgcttcgggccattgtggggagtctttatcttgtctgagaggactaggtttctcttctgtatactgccaaatccactggtttgtgtttattaactcttacggcgcttccacaggtaagtaaattagaagacattgattacgggcatctcactaataaatgaatcagtgccagtttcatagctccaatttttcttgtacttggcaacatttcaaatttttctgatagaatggaatttggccagtatttttgtttcttcattctgttatagtaaattttaaaagtgatttatgggattgtaaaacttgaaggtagcctttgcctacttttttgttttaatcaggtgtcaactgacggacgcttgtttagtctgaagccaacatccggacctgtcttaacagtaactctgtttgggaggttgtatgagaaggactgggcatcaaatgcttcatcaggcctcacagcacaagcaagaataataatgctaatagttatagcacctattgtatgctcattaagttggtagaatattgactttttctcttttttatttgggataatttaaaaaatgatggatgagaaaagaaagattggtccgggttaatattatcctctagtataagtgaattactagtttctctttatttagacaaacacacacacaccagataatataaacttaataaattatctgttaatgtagattttatttaaaaaactatatttgaacattggtctttcttggacgtgagctaattatatcaaataagtatcacaaatcttttacgcagaagaaataaaaactacgggtagaaaacataagaactatcataaaatttacttacaaggaggctgctcttgttaccacttttattatattacgtatcacttattcagctctgctgaaaatttccaatgactttgtttgtttgctctttttgttttttacctaaacaatacattttgattctcttgtgggttgataatgtctccccaaaatttacatgttgaagcacctcagaatgtgactgtatttggagacagggtctttaaagaggtaaaataaggtcattaggatagaccctaattcaatatgactgatgatcataaaagaagaggcgagtagggcacaacaggcacaaagggagaccataaggagacacagaggaaggacaactctttacaagctaagaagagagggcctcagaagaaaccaaccctgccaacaccttgatcttggacttccagcctccaaaactatgagaaataaatttctattgtttaagtcacccagtccatggtactttgttaggcagccctggcaaatgaatcaaagacccattcctgttcctctccccaccactactgttttctactgtaatctgaagcttcaacaaaaggcttacctggtaagaatattcagctggtctgggtcctcaagactccaatagacactcttagagaaggattgctgatggattgatagtgaaaccattagatcattgaattcctctggaattagaaaaccagagagtcccattttaagaaattagatatttaatatagcattgtgtgttctattttagtaacagcagaatctcttgacattacacaactcagtgaaacaacatcatttaagccaaaatatctcccaactgactgatagactctgagcactaatatcatagtgctgtgatgatggacaattacatagtaccgataacagccatgcactgtgcaaagcatgcccttctgcacaggagagcaaggcacttgcagtagtgatctatgccagcaaaacatcattttgagacaaacatttttgtggcagatgtttttcctaaaaagtactatatcatccaagaaatatttgagtaaaatcccttgttcttttgggtgacattaactgacatttgctttttttcaagacctaatagaaaataagaaagcccataatgtatttagaaacaggaatcctcagagcaattctctgtattctcatataatttcaatgtaaaacagaaaacatattgatgtgttggtgataggcttgaattattaaaaacttcaaaaaca

SEQ ID NO: 563 - DNA, 11827 bp, Homo sapiens
ccccctcccgcgcgcgcggttaaatccccgcacctgagcatcggctcacacctgcaccccgcccgggcatagcaccatgcctgcttgtcgcctaggcccgctagccgccgccctcctcctcagcctgctgctgttcggcttcaccctagtctcaggtgagtggggcggggagaggcccggcgcctagaggggccgagccacgagcgccaggatggagccaggcggaggcgtagcctctggaggctggggaagtgggaattccgggggcggaagtggcggggacccttggagcctagggtgtggggtccaatgtgctggaggtggagagaccactgatggctgcaatttgggaggattctgtgctgaacgcggacactccgtggctgcagtgggctgggggtgggggctgctctgcctcgacctcggaagctccgagacgctcagctgtgcggcgtcccctagggctgagatctgagggccccgacgccaagggttagggagctctcgtactcccaggggtcagggactcctggtctggaagaaggagtctctgggggctgtaaggggactcctagggccagagactgagaattccttggggttaaggtttggagcaggaggtgggcatcctctggggctggcgctacgccccaccctcgactgtcccgggcctcccctcccaggcacaggagcagagaagactggcgtgtgccccgagctccaggctgaccagaactgcacgcaagagtgcgtctcggacagcgaatgcgccgacaacctcaagtgctgcagcgcgggctgtgccaccttctgctctctgcccaatggtaaccccacggcggccgagcgggaacggggcggggccgcgctgggctgggaggaggtgggagggcccgggttccgggaacaggggcgcccccggacccggggacccccgggaaagtcaaggcggttgaaaccagatccgtcagtcctctccctcgcacggcccaggggtagacaaaggcgtcgttgaaacgcagccaagggggggtccccacccctagctgggattcgagtctctggtgcatgacgggcttccgggcacgcacagccgggacattgttccccgcggcctggggacccggggccgcagtttccttctcgaaccggccgaagcctgccctgcgggaaagcccggagcctggggcgctcacctctcctcttggagtccctccctgggggcctcccccagccctggggaaagactgggagagcctggcctggcaagattttccccaattcctctgtccaggcggaaaggaactttacagatttaggaaaatgccccgctcatcttaaagatgtgtaagggagcatcggtgagaaaaaaatgttcttgcccaaggtcacaccgccatcccatggctgctggagtcatagtgagggttcagcttttgcctttcaggccaactggctgagtgattcgaagaaagtgaggaatcctccctggacactgtatcgcccttcgtcgtctttcagtcaatctcttccactctaaggattgagtgagcgcgagctggggactctctcaaaggtgcttgctggagctgcagtctccaccaggctatcagaacagggggtggcttaaacagcatggaatctcagctttccgttctccagaggaaaatgctgaggattagaggcagggataggacctggagagaaccaaggtactgtaatgatgttctttatccagaatacagcccctgtgacttttcctctctgttatttccttgaagatgccagcacaggctgggaaggtttgtaatacggtgacccaagacaccgatcagcagggaggtggtaagtggagggggactggcagcccaccaagggcagcttcaaggtcatgagtcccctcctctgggccagggagaggaggaccagaaggagagaggaagatttggagagaaagcaggcagcagccagatgagagaggtggaggagcaaaggagggagtctttgctgtttgatggatgaagaatttgttcccttatctcagatggacagactgaggcaggaagagggacaaggtcagatggcctcctgagccagggaggcagcctggaggtttgaatcctagttctgccattttctagttatgtgatcctgagcatgttgtttacctctctgagcctctgctctaagatgggaataattccaaactctataggattggcatgaggactaaatgaaataatgcatctaaagtgtctattagtgagaagatactccatacacagtggcttgttttgatcataaatggttccctatttatttccagggcagcccaatattacaggttcctactcctttcaagagaatgaatttctttgtattaggaagtcaagactgttggcaacttaacaacatttttttttgtatttatgctttaagttctggggtacacgtgcagaacgtgcaggtttgttacataggtatacatgtgccatggtggtttgcttcacccatcaacccgtcatctacattaggtgtttctcctaatgctatgcctcccctaattcccaaccccccgacaggccctggtgtgtgatgttcccctccctgtgtccatgtgttctcattgttcaactcctacttatgagtgagaacatgcggtatttggttttctgttcttgtgttagtttgctgagaatgatggtttccagcttcatccatgtctctgcaaaggacatgaactcatcatttgttatggctgcatagtattccatggtgtagacgtgccacatttcctttatccagtccatcactgatgggcatttgggttggttccaagtctttgctattgtgaacagtgctgcaataaacctatgtgtgcatgtgtcttgggcatttgcgttggttccaagtctttgctattgtgaacagtgctgcaataaacctatgtgtgcatgtgtctttattgtagaatgatttataatcctttgggtatatacccagtaatgggattgctgggtcaaatggtatttcttgttctagatccttgaggaatggccacactctcttccacaatggttgaactaatttacactcccacgaacagtgtaaaagcattcctatttctccacatcctctccagcatctgttgtttcctgactttttaaggatctccattctaactggtgtgagatgttatctcattgtggttttgatttgcatttctctaatgaccagtgatgatgagcatttttcatgtttgttggctgcataaatgtcttcttttgagaagcatctgttcatatccttcgcccacgttctaatggggtttttttctcgtaaatttgtttgagttcttgtagattctgtatattagccctttgtcagatggatagagtgcaaaaattttctcccattctgtaggctgcctgttcactctgatgatagtttcttttgctgtgcagaagctctgtagtttaattggatcccatttgtcaattttggcttttgttgccattgcttttggtgttttagtcatgaagtctttgcccatgcctatgtcctgaatggtattgcctaggttttcttctagggtttttatggttttaggtcttacatttaagtctttaatccatcttgagttaatttttgcataaggtgtaaggaaaggggtccagtttcagttttctgcatatggctagccagttttcccaacaccatttattaaatagggaatcctttccccattgcttgtttttgccatgtttgtcaaagatcaggtggctgtagatgtgtagtgttatttctgaggcctctgttctgttctgttggtctatatatctgttttggtaccagtaccatgctgttttggttactgtagccttgtagtatagcttgaagtcagttagcgtgatgcttccagctttgttctttttgcttaggattgtcttggctatgtgggcttttatttggttccatatgaaatttaaagtcgttttttctaattctgtgaagaaagtcagtgatagcttgatggggatagcattgaatctataaattactttgggcagtatagccattttcacgatattgattcttcttatccatgagcatggattgtttttccatttgtttgtatcctctcttatttcgttgagcagtggtttgtagttctccttgaagaggtccttcacctcccttgtaagttgtattcctaggtattttattctctttgtagcaattgtgaatgggaattcactcatgatttggctctctgtctattattggtgtataggaatacttgtgatttttgtacattgatttgtatcctgagactttactgcagtttcttatcagcttaaggagattttgggctgagataatggggttttctaaatatacaatcatttcatctgcaaacagggacaatttgacttcctcttttcctaattgaataccctttatttctttctcttgactgattgccctggccagaatttctaatgctatgttgaataggggtggtgagagagagcatgcttgtcttgtgccggttttcaaagggaatgcttccagcttttgcccattcagtatgatattggctgtgggtttgtcataaatagctcttgttactttgagataccttccatcaatacctagtttattgagtgttttagcatgaagggtgttgaattttatcaaaggccttttctgcatctattgagataatcatgtggtttttgtcattgattttgcttatgtgatggattacgtttattgatttgtgtatgttgaaccagccttgcatcccagggacaaagccaacttgatcatggtggataagctttttgatgtgctgctggatttggtttgccagcattttattaaggattttcgcactgatgttcatcagggatattaacctgaaatttttttgttattgtgtctctgccaggttttagtatcaggatgatgctggcctcataaaatgaattagggaggaggctctctttttctattgtttggaatagtttcagaaggaatggtaccagcaactcctctttgtacctctggtggaattcggctgtgaatctgtctggtcccagactttttttggttggtaggctattaattactgcctcaattttggaacttgttattggtcgattcagggattcgacttcttcctggtttagacttgggagggtgtatgtgtccaggaatttatccatttcttctaggttttctagtttatttgcgtagaggtgtttatagtattctctgatggtagattgtatttctgtgggatcagtggtgatatcccctttgtcattttttattgtgtctatttgattcttctctcttttctttattagtatggctagcagtcagactattttgttgatgtttttcaaaaacccagcttgtgaattcattgattttttttgaagggtttttcatgtctctatctcctttagttctctctgatcttagttatttcttgtcttctgctagcttttgaatttgtttgttcttgcttttctagttcttttaattgtgatgttagggtgtcaattttggatctttcctgctttcccttgtgggcatttagtgctataaatttccttctaagcactgctttagctgtgtctcagagattctggtatgttatgtctttgttctcattggtttcaaagaacttatttatttctgccttgattttgttatttacctagtagtcattcaggagcaggttgttcagtttccatgtaaggttatgcggtcttgagtgagtttcttaatcctgaattctaatttgatggcactgtggtctgagagactgttaggatttccgttcttttgcatttgctaattagtgttttacttccaattatgtggtcagttttagaataagtgtgatgtggtgctgaggagaatgtatattctgttgatttggggtggagagttctgtagatgtctattaggtctgcttggtccagagctgagttcaagtcttggatatctttgttaattttccgtctcattgatctgtctaatattgacagtgggggttaaagtttcccactattattatgtcggagtctaagtctctttgtaggtctctaagaacttgctttatgaatcagggtgctcctgtattaggtgcatatatatttagcataattagctcttcttgttgcattgatccctttaccattgtgtaatgcccttctttgtctcttttgatctttgttggtttaaagtctgttttatcagagaatagaattgcaacccctgatttttttttgctttccatttgcttggtaaatattcctctatccctttattttgagcctatgtgtctttgcacttgagatgggtctcctgaatacagcacaccaatgggtcttgactctttatccaatttgccagtctttgtcttttaactggggcatttagcctgtttacatttaaggttaatattgttatgtgtgagtttgatcctgtcattatgatgctagctggttattttgtctattagttgatgcagtttcttcatagtgtcgatggtctttacaatttggtatgtttttgcagttgctgattccagttgttcctttctatgtttagtgctcctttcaggagaccttgtaaggcaggcctgttgatgagaaaaatccctcagcatttgtttgtctataaaggattttatttctccttcatgtatgaagcttactttggctggatatgaaattctgggttgaaaattctttaagaatattgaatattggcccccactgtcttctggtttgcagggtttctgcagagagatctgcagttagtctgaagggcctcccatagtgggtaacccaacctttctctctgggtgcccttaacatttttttcttcatttcaaccttggtgaatctgatgattatgtgtcttggggttattcttctcaaggagtatctttgaggtgttctctgtatttcctgaatttgaatgttggcctttcttgctaggttggggaagttctcctgtataatatcctgaacagtgttttccaacttggttccattctccccatcactttcaggtacatcaatcaaacataggtttggtcttttcacatagtcccatattttttggaggctttgttcattcattccttttcattattttttctctaatctcatcttcattctttatttcattaaattgatcttcaatctctgatatccttcttctgcttgatcaattcggctattgatacttgtataggcttcatgacgttctcgtgctgtgtttttcagctccatcaggtcatttatgttcttctctaaactggttaatctagttagcaattcctataaccttttttcaaggttcttacctttcttgcattggggttagaacatgctcctttagcttggaggagtttgttattacccaccttctgaagcctacttctgtcaatttgtcaaactcattctccgtccagttttgttcccttgctggcgaggaattgtgatcctttggagaagaggtgttctggtttttggaattttcagcctttttgtgctggtttctccccatcttcgtggatttatctacctttggtctttgatgttgatgatctttggatgggccttctgagtggacgtcctttttgttgatgttgatgctattcctttctgttagttttccttctaacaatcaggcccctcagctgcaggtctgttggcgtttgctggaggtccactccagaccctgtttgcctggctatcaccagcagaggctgcagaacagcaaagattgctgcctgttccttcctctagaagctttgtcccagaggggcacccgccagatgccagccagagctctcctgtatgaggtgtctgtcagcccctgctggaaggtgtctcccagtcaggagacacggaaatcagggactcacttgaggaggcagtctgacccttagcagagctcaaatgctgtgctgggagatctgctgctctcttcagaaccggcaggcaggctgaagccacatccacagctgccccttcccccaggtgctctgtcccagggagatgggagttttacctataagcccctgactagggctgctgcctttttttcagagatgccctgcccagagaggaggaatctagagaggcagtctggctacagcggctttgccgagctgtgttgggctctgcccagtttgaacttcctggtggctttgtttactctgtgaggggaaaactgcctactcaagcctcagtaatggtggacgcccctccccctaccaagcttgagagttccaggtcaacttcagactgctgtgctggcagtgagaatttcaagccagtggatgttagcttgctgggctccatgggggtgggatccgctgagctagaccacttgtctccctagcttcagccccctttccaggggcgtgaatggttctgtctcactggcattccaggcaccactggggtatgaaaaaaaaatcctgcagctagctcagtgtctgcccaaatggccacctagttttgtgcttgaaacccagggccctggtggtgtaggcacccaaaggaatctcttggtctgtgggttgtgaagaccgtgggaaaagtgtagtatctgctccagagtgcactattcctcacggcacagtccctcatggcttcccttggctaggggagggagttccctgacctcttgtgcttcccaggtgagatgatgccctaccctacttctgctcgccctccgtgggctgcacccactgtctaaccagtcccaatgagatgagccacgtacctcatttgaaaatgcagaaatcacctgccttctgcattgattcactgggagctgcagactggagctgttactattcggccatcttgaaagctgaacctaaatcttttttttttttgagatggagtctcgctctgtcgcccaggctggagtgcagtggcatgatctcagctcactacaacctctgtctcccaggtgcaagcgattctcctgcctcagcctcccaagtagctgggattaccggtgcatgccaccacgcccagttaacttttttgtatttttagtagagcggggggtctcgagtcctgacctccgatgatcccacccgcctgagcctcccaaagtgtgggattacaggcatgagccactgcacccggtgatctgtcagccactttccttgtcctctacagctaatcacccagttctgtgcctgtgttttacacacaaaaacctgcacatatttatagcagctttatttataattgccaaaagttggaagcaaccatgatgtacctcagttgatgaatggatttggctgggcctggctcccctctatctaacctgggaagtggagtgtgattgtgtgtgtgtttgttagtggaaggacgtgtggtttctctctgcatggatgaatgagtgtatttggagggtcatggtgctgagagactgcaactgggattcggtctgtgggtatgagtgaagattataagtgtgtaacccctcacatgtgtactgtactttacactttaagtggcagcatagtgcttaaccatggcagcagcagttaacacatagactctgcagctagatttcttggggttcaaattctgcctcaattctgtgtgaccttaggcaaattacttaacttctcagtgcctcagtttcctcacttgtaacacaaggaaatattaacagatccctccccttcttttaggattattgtgagaattagaagagttaatatatgttaggggcttgatacctggcatgtaataagagctaattaagtgttcactgttataatttctcataactacagagtagtttgatatttcagggagaaataatatatgtttgtttcccactgctttcacaacaaccctatgttgtaattagcactgttccactggcacctaaagacacggaggctctgggagatttctggccctaggccacgaaggcccacttgggactcaagctgaggtcctgtgattccatttgggagcaggaggagggatttgcaggtgatcttcctgggcctcctgagagcagctcaggtgcccaagatggactcaggcaggcagctctgctgtatgtgaagcccagtgaggggcagtgggggggccatgctgcaggtacaagttaatctccctgtatcgcctctgcccacttacccttactcctttttctacccagataaggagggttcctgcccccaggtgaacattaactttccccagctcggcctctgtcgggaccagtgccaggtggacagccagtgtcctggccagatgaaatgctgccgcaatggctgtgggaaggtgtcctgtgtcactcccaatttctgaggtaagtgaacgggaaagagaaagtgcattgatggccaggtgttgtgggaaacaggagaaaacgtcacccaggcggaggtgaagggaggttagttgcagggacagttgggaaaggtataccagtggggtgaccctcagcctgttctaaaagaagagtgaaaggtgggtagtctgatgagctgcattggggaggctgtctcaggcagagggaacagaataagcaagagcttggctgggtgtggtggctcatgcctataatcccagcactttgggaggctgaggtgtgcggatcacctgaggtcgggagttcaagaccagcctgaccaacatggagaaaccccgtctctactaaaaataccaaaaaaaaaaaaaaaaatttaatgggtgtggtggcgggtgccacccacccgctactcaggaggctgaggcaggagaattgcttgaacctgggagacagaggttgtggtgagctgagatcacgccattgcactccagcctgggcaacaagagcgaaactccatctcaaattaaaaacaaacaaacaaaaaacagcttggtggtacccttgggttgaaatctcgtggttgtcatgtgctacttttaacaatttctcagcaaagtaacctgaagataactgatagaatccaatagtgcagagatgagcaattgaaatctagagagggggtgtgctcttggtgcccgagagggaactatggtttctctaaactaagctatggtctccctggagccagggctctcagatgccaactgcatggataggctttgcagtcaagaagaccttggttcaaatgttagctctgacacttacctaaccttctcacctccctgagtcacagttatctcgcttataaaatgtagctaaataagatctaattgatcagataatcccattttaacctaaagaagaaggcatggcagaacttcctaatagtagaaggattcttggggagagaaatggccatgacccctcaggaaggccacagtggacatctgggaccacagtatacccaggtgcctgctagggatggtctgaccacagtatacccaggtacctgctagggatggtctgaaggagaagagtatgtctagaacctgtagaaaatgcaagcagagcccccagaaggtgaggctttgctgtgtgggtgtgtgggatggggtggggtcaaggagctggtctaggatttaagctgcaggtactcctgcctagtctaatggatattgttgttgatggtattgttataattttcttcctccagctccagccaccaccaggctgagcagtgaggagagaaagtttctgcctggccctgcatctggttccagcccacctgccctcccctttttcgggactctgtattccctcttgggctgaccacagcttctccctttcccaaccaataaagtaaccactttcagca

SEQ ID NO: 564 - DNA, 35451 bp, Homo sapiens
ggaccatcacactggggaccggcttctctgctctcccgttatgggggtcgggggaatgatgggtcaagggtcttccgaagaaagcgagaaaggaacaggcgccttcaaaagcccacttggcgatgggttacagtaagaggtacctccaggcccgggcatccgctggaaacaggggtgggtagggtcgtgtcatctaaaggcgcagcttcaaccagaagactagaagtcagccaggagctgggagtagtgtcacgcggggtgggggttcctatgagcatcactttacaaaaccaggagggacggaagtgcgagggggcagagtcttggaaacaggtcctgggccaactgcaacagaatatacccgccgcgtgtaggggaaggcggcgccagggagagggcgcagtctctgaatctttccacggggtccatcctagggcccctccaggttcaacggtctcctaacctgtagtcacccacaagagcgtgccctttctgcccgcccttcctagcgttgctccctgcttggctgagcactgcggagtttcacgcctctaaaccccgcctcttcttgcaacctgtgttggcctcatctacccagcaactgtcgacgtcacacgacctgggcctccctgaatgggagatatttactaggcaatcccgcctactgttctgaggtttcccctccaggtgcagcttcagagccaggcgagccaggaaggaccagcgggcgaggtggtgagttgtgaggcgcgcccagtccctctgttcccgcctggcacttgctctggccgcgcccgccccatctgccacttcggagaggccacggctctgagctgcggccgctagtgccctgatgggccctgtggctggggtcttgcacattcttgggggtgggcctaaggggataggggaagtggaaggggcctcataggaattaaaaagcttaagggaaaaggtgatgcagttagggggtaaaacattgaggatgataaaagaggagacatccgcagctgaaaagtgcgctgcaaaaggcagtgggccgtttggtgtgccggaaacataagaaaccacagtacaaaacaccaattttattataaatatcaagaacctacagggtgtttatgggccagcatatgccttcagttatgttgaaaatagctgatcatctttccgtacattctgaacatttctcagtttcagagtgctggccacaccaaagcatcagccctggctctaaactccgttacagtaaggaattacaaatcctgtgtttgtactccaggaagtctgcattatcacgaggagcttggaaaggaggtaacacactcaaggcaaatttcaagtaactcatcctggaggcagctgcctactctgcagctgtggttctccaccacagagagaagaaaagggagggagatggagtgcgcaggtctgagaaggctttcattctggagcatctgcaggagcctgcaccatggcccagtagcacccctttttctccatgagctgctggtgggttcccccctcccggatagcgcctccttccagaaagaggatgtggtcagcctgctccaccaggctgaggtgctgggtgatgagaagcactgagcgggagtaccgctcagggctttcgtacaggagctgctccacctgaggaaagacatcggaccgtcagagccggggactaccctcagcccagggagacacctgtgtttccagggctgggactgacctcacaggatcactgctggctctgctaacaaccccaaggacaccaacgtttcccattctgagtacttctccgcaaaccctttgtttcattaaggactgttttacatgaagggtgcaaaagtaggataaaaatgagaaccctagggtgaaacacgtgacagaagaataaagactattgaatagtcctcttctctacccatggacttggcatttttatattcgattttaaggaaatataacttagtagtaaagagatgagcattcaagtcaggcagacctgaatttgggtcaaggctgcgccactcaaaagctatatgacctctatatgagcagcttattcaacctcttttaacctccattttgtcatctgtagaatgatgataaatgcctagctcagaaggattcctaatgaataaatgagtgacagtgcatgtaaacagactagcttaattaatattaatatgattaggatgggctgggcccggtggctcatgcctataatcctagcactttgggaggtcaaggagggaggatcacttgggcccaggagttcaaggccagcctgggcaacatagcgggacgctgtctgtacaaaaaataatttttttaaataaacgatattatgaggatggtcttttccttatgtttcgctttagaaattcagtctataggactgggcgcagtggctcacacctataaccccagccctttgggaggctgaggggggcagattacctgagctcaggaattcaaggccagcctgggcaacatggtgaaacccatctctactaaaaatataaaagtcaaccaggcatagtggtgtacacctgtagtcccagctactcgggaggctgaggggagaatcgcttgagcccagcaggttgaagctgcagtgagccaagattgtgccactgcgctccagcctgggcaactgagtgagacactgtcttaaaaaaaaaaaaggaaagaaagaaagaaattcagtctgtagtttgtagatagtctcttttaactgattctaggtgtctttgcctcgtcttctatctctactccttggggaggcatccaatggaactggatttgggaactgagaactgcaaggactggtttgtataattatgatgttagtaaaactaacagaagatgtataaaagaagcaagattgggtgggatatagccattaagaagatgactgcctcacctgtaactggctgtttgcatccagggcactggtggcatcatccaggataagtacacacggtttccggatcaatgctcgggccaacgccactgcctgtcgctgaccccctgacagctggctcccagcctcgtctacctctgcagagcaaagggccaagatgagaacggtatagccacatgtgtgcacgcatgtacatgcacacagacacactcatgcattcacgcactcacacacaccaagatctgacggttgtagctggataggggagattctgggaagatgaacagaatcctgaggatgtcaggatgaagaagccataggagcatgatcttacaacttcaaattgatgtccatgagtaaggaggaactgaaggataaaggcaagactactggggtttcagcaaaggtaaagatggctgggtggtgagatgagtggagagagtacctgtgtcatagccctgagggagtccagagatgaaactatgggccccagactttactgcagcagctgtgatttcctccatagttggcttctgggtcaggccataggcaatattttcttgaagacttcttccaaatacctgtggctcttgtcccactgcagccacctgagatgaaatatgatgaagagtcatagaacaaggcacatgggagtatggttatctagagatcgaagactcaaaatctttattgagaacatgtcacaaaatcatactacctccctcctgactacaccaccatctccacccaaggtctcttatcattccctaacccctctttcagagtgctcagtaagaatgctcttcgtatttgatgctccctgccctccttcaagccacctgcttccatacctgcctgtgcaggtagcggtgctcatattggggaaggggcttcccatccaacagcagctgtcccccggtgggctggtacagattctgcagcagggcagccactgtgctcttcccagacccattgggtcccaccagcgccgtcacctcgccagggcgtagggtgaatgtcagcccctagaggccagagaagcacacgataagaggctaccaaggcctctaaccttgagagtgtcattgccttgttacatagcatgatgtcttaccccagaagaaaaacagggaaatatagaaactcctaccctcccacatgcacagatttctgggtgatgcctccccaaggagtagagatagaagaagcggcaaagacaagggcagagacccagcaccactatgccacacacttgatgtcagataccaccaggaaagggaaaaatcacattccaaattacaaaggaaaaggaaagatggaagaccgaagacacagattttgctgcagcaattccttggaacgtgagagcactctcttcgaaacctcttctctcattctctttggaagcccaaactgggttcttgagtttggggaagatttatggaacagatgatgcctaccattgcctttaaagggttagggaggatatatgcttggcagtaagcaggctgaaggcaggaagaaaatttaggatggcagaattgcagttggggccagtggaatacagggagtggtaggttgtacctgtagcactaagacatctgggcggtttgggtaggcaaaggagacatcttggaactggacaaggccctccaagtgtaagggagtcaacagaccactgggtgggcagcgaggggtgcggtccaggtactcaaatattttctctgaggagcccacagccttctgtactctggggtagatggagagcagtacctagagggaggtaagaatagtgaaagtgaggtagtctgcttgccagcattatgtgaagcaagaagggtaaagaatggaaggacatcacacagatggtgctgggccagaggaaggaatcacactggggagtgaaggtggagggacctcacctccacagcctgggtgaactgcatctggtagagaacaaatgtgacaaggttcccactgcttacagccccactggtcaccagctgcccaccaatgtagaggattcccactttcagcagcatacctgaaatctataaagagaccacaaaaaaagggactgaggtagagaaatctggaggggacacaaagaaccacagtcattaacctgaaggaaatatcaagtccctgtctcctaagtgacatcggcaggctcaataggcagacaggagaatgaaccagagaccccatggagtctgactcaatgcacatcatgcaagtcacagttatcttcaccaccatcaccactatcaccttgtctggggagcattttactcttcacaaaaggctttcattcatgtgatgtcagctaatacatgaagagccttataaagaaggttatatcactccatttttgaaaaatgaggaaacaaccagtcgggcgcagtggctcatgcctgcaattccagcactttgggaggccgaagtgggcggatcacaaggtcaggagattgagaccatcctggctaacacggagaaacctcgtctctactaaaaatacaaaaaaaaaaaaaaaattagccgggcgtggtggcgggtgcctgtagtcccagctactcaggaggctgaggcgggagaacggcgtgaacccgggaggcggagcttgcagtgagcccagatcgcgccactgcactccagcctgggcgacaaagcgagactccagctcaaaaataataataataagtaaaaataaacaaacaaacaaacaaataaataaataaagaggaaacagtctcagagaaggtaaatttgttgtcatgatcacaagacaagtaaattgcatcatcaagccaggatcttcggatcactggcgtagctctctttccagtgcatcacagatgtccctcatccctggcttccactattcccatcactctcactaacaaatctacaaggtaccagcatgaagcagtcccaggtgcaagaatttatggcgccctgcacttcccctgagaggcaaaggaaggccctaggactggaagacacgcatctctccaatccacatggttgggtggattttatgtaccatactgaaaggaagccacctagcatctttaaagagagggagggggctagggacactgagtagagtcattgagcctcaggttgctaggacgaaaatactgaaccaaccatttcccagtaaagaaggagtgggagcagggtcataggaatgggaatggagtcacggcatcttaaggacaagggaatgggtattcatcttcaggtgctcacactagtggtccaggagttgactgcataggccacagcctccttctggttgagtgtctttatttcttgcagcttttccctaaacttctgggcttcgccctcctcgttggcaaagcttcgaactgtaggcatggccgacagagcctcaatggccacctggctggactttgccagagattcccgcacctgcacttccagcaactgtggatacatggacaagagatgtcacacgggttggcaaaccatcagggacactaatacctgagttacctatttggaaattaaaggtgagaagagacagaggaaaaggagaaaagagaaagagacacagctatgccccttggatgctaaagaaatacgaggaagaggaaaatgactcagaacgggttggggatcaaattcttaaagacagattgtggggagaagctagaaaagaagacccagagagtatggaggttaatgttgagcaacctgggaacatggaccacagggacagggtgttccatgaagatggagaatcagtaagggtgccaggaaagctggactgaaagcaatgtgagaggaactgagtctgccaagtctgggagatgagggtctgtgtagagcgggccaactccatgaacatacctggtaccattttcccaccttcttgggcagaaggaaaagcagaggcagggtgatcagggtgaccatggtgagggacactgatccccagagcatgatccccaagagacataggcctcgcaccaggtaccacagaaataagctcagattctcactcagagaatcactcagggtggacgtgtcctctgttacccgagacatgatgttacctgcagggttggggagaagagagtgaggtgaatcagacaggttccaagtgatgagacgaactaacaatgagccaggatgccagggtcaggggtgtcaacatggggttctaaggaggctgcaggaaacaaggttagggttctccagaggtctgcaaatctcagtgcagggaagatgagtgttaaagaggaaaggcctgaccttcattttaattataaagtcattaatgcacatgtgaatttccattttcctgaaagctttctgttccctagagaacctgtatgtcccatgctatacacacaggcaggaagagcttaaactggtcacataacagagatggaggaggagggtgctgctaggaagcatgccaaagtctgtggagcactcactgggactagggttctaaccccaggtctatctctagccatatgtaactgtacagcttctagtgctgctagaaagcatgccgaagtctgtggagcactcaagagaccagggttctaaccccaagtgtgtctctagccatatgtaactgtgcagtttcagcatttagggtcttggcctcagtttccttctctgtcagatgaggcagttggtctctatgagctcaaaatttccaggtttgaaattctatggtttctatctaaggatacataggaatagatttataagaaaatgctagatgaaaactctaggtttttcttaaggtaaggaggacaatattttgctcctgaggtatatcaagaatgagaaaaacaattgtgtgtgtgtgtgtgtgagagagagagagagagagacagagacagagagagagagacagggagagggtatatcaagaatgagaaggaacaatgtgtgtatgtgtgtgtgagagagagagagcggggaggggggagatcaaagcagatgtatgaggatatgaacagtacatggcgtataatgaaagagtttcaggagaaacctgtctggttctgttggaaaaactccgtctcctggcgcaggacagccccaaacacctctccctgcaagtggctgtgcacgtggcccatggtgttgttatagatcccgtcacccacgaactccagcactgcactataaagaacccggaaaaaaaggggatcagggtgtgttcagggaacagactgaaggtcccaggtatccccatataagtgcatttcggacagcagccccaacttccaactccctcatttgcagggtgccccattttcagcccccagacctggctatggtgagaatggacatgagagttaagtttcgagtgaaggtatcggctgagccatcttgtagaatccagtcagtgaggcggcccgtaaagaatggaatggccatctcccctggagaaagagaagagaggtcacgcacaaatattaagtctaagtaggtcagttccagtcagactggccccaccacgcctcctccccctcaccattatcctggagggcatcagcagaaaggaaacactgacgtctcaatcccgaacctaaataggctgccctggaactcactaccctgtggttgctctaccagaactttcaggattttattaggaaggctggagatcatgaagtagaaaagcctcctgttagagatgaggatgccccgcccttcggccccagagcaaaggatttccccgcttccggcgtggcccaaagaatcaagacccggtcagcaatggagcccagaacctctggcccccgccagtccagtgccgtttcttctacaccgaagtggtgttccaagacccacgctaggagtccttctcctgctccacatttcccagaacccacgctactctaccttactgacaattacctttgattcctgtcccagtccccttgtgtcctcccctcttgccctgcgttccccttaccaagagaggagaggaccaccaggaccaggaacagcgagaggcggcgcgtctccgagcccaggcagcctagaagccgacgcacagggtttccagagccgccctgaccgccgggcacccagaggctcccgagtttgtgccacagggctgctgcgggcagtgccgctgcataactgacaacgaaggcggtagggtgacttccccagtgcagtagcctggtgctatccgcggacccgggggctccccatgagatcagctctcggaacaaggcaagtcccggcagggccaagcccagtgccgcagctaatggcttcaaagcagccagccagccctgggcacctgcgttttcgctcttggagccaaccgttgccctgaggaccccgcaggcccccagccagagcacggcccagcggctcaggcccaccgcccagacccggagcagtggcagcgcggtgggcaccagcagggagaatatgcggggcagcgcggtccggagcagcacccagtcggcgagaagtagcagtactgtccccagccatgcgagagaagctccggggaggcagcggcacccgcggggagcgggacacctagagctagccattggcactcggacgccgtcccggtcccggccgggcctgggactctccgcgccccggtggggcctgaagctccgggtaccgccgagtcctcccctactggcggctgggggagggaacgagggcggggctctcggaaagtcccaggaacaggctgatcctgcgctggcgagaagctcagccatttaggggaaagcgaaatcgaaagcggccgcctgctcactagataacgcctacttccaaaagtggcctgcccagactattttggtagcaagcgtggaaatcagatctgagaatctcgggagcagccctggtgcccaattttctccatcacgcacacccttctcgcctctccctgcctcctgcctttccacttgcaccagttttcccaccccagcctcagggcggggctgcctcgtcacttgtctcggggcagatctgccctacacacgttagcgccgcgcgcaaagcagccccgcagcacccaggcgcctcctggcggcgccgcgaaggggcggggctgtcggctgcgcgttgtgcgctgtcccaggttggaaaccagtgccccaggcggcgaggagagcggtgccttgcagggatgctgcgggcgggagcaccaaccggggacttaccccgggcgggagaagtccacaccggggtaatgggtctgggcttgagggttggcagaggggtggaggagatgcagcggccaggggaccctggaagcgcgcgcggagaagtgaatgcagagaccaacgggagcgcagggaggtcgcctgtagcagccagcgcttgcaacccgcaatgagcatagagtatttcttttctgaggggggtcgtctagagtgtccgtgaagggaacaggcacgcgaggctggtggaaaaagcgggtgctttgactcttagctggaagcgtcaacgggaagctactctaaagcgctttcgctttcactctggtcccggacagtgggggctggttaaatcaagaaagggggttggggatggtgcaaagagatgaggaaatggtgccctgggtgaagtagaacagcacttgggagaaggaaatataggcacttattgagaaggaccaactcatcacacagacttttgataaacttgccactgggcaactcttagcccaagcactgataatgggcgttctgtgttaactagtgatgcccttccctagcttgacccaggaaggcctctccttggcccagatgctgccttactcccttccctgtgtcttccctgcccactcccatgtgcccactggggggactttgcttaggatgggcgcctggggcagatggcagccccaagactggctggctggcttctgctctggactactgccaccactcgtggcttgggggcggctttgttagagaggaatagcctctaacttgaagttaaccctgttctttgaccctctattcatgataagtcggtccgtcggaaagcatactcagaggagcgtcctttggggccagagtaacttacggcctggtaagaaagacacagtgaaaccacttataatttgggaaatctcccctcactgccaaatgagcagtggcaagtaggaagtagaagtggaaacaagggataagagttagacctgaattttagtcccaggtctactattaactctgtgtgactttgcataagtcgtttgcattttctgtgacttggtttcctcatttgaaccgaggatctttaaggctccttccaactcaatagtagaataaatgtagctttatcttccctcacttcttcttgattcttttcttgacctggaaaagtcagcttaaacttctcagtcaaattatctcttggtacaaatttacctccctggctgctgagatatgtatttacctcttgatcggaaattccataactgaaacttttattttcaaccatctgtatgtgttccttgctgcttctctcctgccttgcccctggccatgctaaccactgccctcctcgattttttccaatgttcagtaaattggaagagctcacttctgatgaaatggggggtgagagtggaggattgtggaccaaaaaaaaaaaaatagactgaccttgtttcccaagatcatagtcaattactctgtgttgggtctacaccacatctgcacatactatgagcccttccgttggagataattttcacttgcggagctgcttcacttctacctgtaggagcctcatctccacctctctacagtggagaggattccactaggcaagttggaacttagggacacagttctttctgtgttgtatcacagctgggctgtggcattcccctgcagccggatgaagcaatagagaaagtggaaagatgaagggaaaaaaagcctgtactgacagtcagctctggcctgttactgtgtaatctttgagccagtcacttcgcctctctgggaatgtttcttcttctctaacatgagggcatcaaggctgttcttgccctgacattccatattctgtgtctctgcagaccaccatcatggcagtggagtttgacgggggcgttgtgatgggttctgattcccgagtgtctgcagggtgagtaaaagtgaagatgtatgcatttggaaagaagctaatggcctcaaatacacactttccttacccattcatgaaaagactggcaaactggagccttggaggaatggagttgaccttccccaaaagccactatgataagctatttggtgggtgcttgggtctctgaatttgtggaggaggatctggggtctgaatgtgtatgtgacctgtcccagtagtgtacagggatgagtaaaggaatagggtctgagagggggacaggagatagatttttgagggtcttctttccatctgtgcttagggatcaaaaagatgattctgtcaagcagatacctggtttctcatttaccatatattgaactattttgtctcttctcccactcctaaccaatttcctcacatgcaaaatgagtatatggggttaggtcaatattactgacattatgttccatagaacataactctctcaagattgttaatagcaaagaaaattgatgaggcatatttttcttaccttagcattttttgctttgttataaaatctaagcctgaaaaataagcctaattttgattaacatctgcagtgattaataatatctgagatgattatttgcctcctgctttaatccaagcattaaacttcatgctattctcttgtcaaagaaatttgagagacattgaatgatcaccctcaaaaattcctgagttctggttgggtgcagtggctcacatctataatctcagcactttgggatgccgaggtgggcagatatttgaggtcaggagtttgagaccagcctggccaacatgttgggaccttgtctctactgaaaatacaaacattagctgggcttggtggtgggtgcctgtaatcccagctattcgggaggctgaggcaggagaatcacttgaaccagggaggcgaagtttgcagtgagcccaagattgatccactgcactccagcctgggtgacagagtgagactgtctcaaaaaaaaaaaaaaaaaaaaaaaacctgagttttaacttggtgactgttgactccctcctgacagcgaggcggtggtgaaccgagtgtttgacaagctgtccccgctgcacgagcgcatctactgtgcactctctggttcagctgctgatgcccaagccgtggccgacatggccgcctaccagctggagctccatgggtatgaagctctggagttctgactccccacccactagagctcccccaacctgcatgaatccctgtacagtgtgctgttccaggagctggacactgggaaatggaaaagtcttgtttcggctcttgctggcacttgaatctgtcagtttctgcatctgtaaagtggagataatatagtacctcatgagacggttattttgagaaccacattctatatgtgaacacagtttaaaagctgtaaatcactatcctgatataaataatcaggaagaaggtgatattgtgacccaccataatatcaggcagttaccatacgagaaatcaaggtcgttgggacggaagtaaccttatctgcttttccccataagagcagggtccttgcagccaaaagaaagttatgtgggtggggctgagcaaaagagtgagcaattgaaagcttcttaccagttggtggtgtgggactctggttcccctgtacatgtgggagggaggctgcagtttgagctattgcagttacagttttcaggggtcgtttagcagggatgatggtaacagtataggagaatgagacttaaaattctatcaacctttattcctaatatttccctcaggatagaactggaggaacctccacttgttttggctgctgcaaatgtggtgagaaatatcagctataaatatcgagaggacttgtctgcacatctcatggtagctggctgggaccaacgtgaaggaggtcaggtgagtttctcccaaagcactctctcctctgggcttccccactctcctgcagaggaagatggaagtcctatgtcattctagcaatgagttccaaggacactacctctgaaagcatagtactttggggatatgagataccagggcttcattgcagggtgcagagaccacttaatgtctcagtgggaaggaagggcttgatgattctttaacctgaggatccctttcccaggtatatggaaccctgggaggaatgctgactcgacagccttttgccattggtggctccggcagcacctttatctatggttatgtggatgcagcatataagccaggcatgtctcccgaggagtgcaggcgcttcaccacagacggtaaccagccaagtggaagggtacctggggagggctttgaaacatgggaaggaagtagattatgaggaacaggaagagaaatacaggggtggccatttaagttaatgccgggcctggtacacttttaagagtgaaaaggggcaggacaaatgcaaagctcaatggggttcttgggcaatacggataaaccagggctgttctgagtaaatcaaatgaggatacacagtcactgtgagaaccagtggtgtgctaagcacagtggctcacacctgtaatgccaacaatttgggaggctgaggcaggaggattacttgagcccaggagtttgaggccagcctaggcaagatggtgaaaccctgtctccacaaaaaacaataaaaaaaagtaaaaaaaaaaatgaactgggcatagtggtgcacacctgtagtcccagctactcaggaggctgaggtggaaagatcatctgagccggggagatcaaggctgtagtgagcggtgattgcaccactgcgctgcagcctaggtgacagagagagaccctgtctggagaaaaaaaaaaaaaaaaagaaccagtggtgtgctgaggtgtgctgaggctggcttgggaccactcatgagagcggactgttaaatagtcaaggatttgtgaactgcttagctatttgtaacttgcaattcatcatagcgggagcatttacaccacggacatcagcagatgccacatatggaagcctttttgtaaaaaaactgatttaccagcacaccactaaatatgccttcctggaagatgagttttgaggtgaaagtggtagtaggcatatggatggagggggagtaaaaagatttttgaagctaagccatcctctctctccctctctccaacttgaaaccctctgcagctattgctctggccatgagccgggatggctcaagcgggggtgtcatctacctggtcactattacagctgccggtgtggaccatcgagtcatcttgggcaatgaactgccaaaattctatgatgagtgaaccttccccagacttctctttcttattttgtaataaactctctagggccaaaacctggtatggtcattgggaaatgagtgctcagggagatggagcttaggggaggtgggtgcttccctcctagatgtcagcatacactctttcttcttttgtcccaggtctaaaacatctttcctagagaaaacaaaagggactaaactagaaatataaagagccctatacatgacaggtgatcacgtactgaatgattttgaagtagtacaaacaataaaaattctcattccgcatcatcatgcggtccatgatgatgaggccgcaagtgaggtgatgggactctttcctttaaggctaagactgacagataggcaagacacctacacacatgagaattagctaagactatcagcaaactcgcatgtaaaagaattcctttcataatgcattcattcatattaaagggcaatacatgaaaaatgcttaaatattttggggcacttgtgaatttcaaagaataatgacaataaccaaaagaagctacatttgtggcattggctaaatgttttataaattttatctcttaaaattcaaaccaaaaaaccccctgtattcacacctgtaatcccagcactttgggaggtcaaggcgggaggattgcttgagcccaggagttagtgaccagcctgggcaacatagtgagaaccccatctctacaaaaaaatttaaaaattagtcgggtgcggtggtgcatgcctgtagtcccagctgcctgggaggctgagtgggaggatcgcttaggcctgggagtttgaggctacagtgagctgtgattgcgccactgcactctagcgtgggtgacagagaaagaccctatcttaagaaaaaaaaaagaaaagaaaaagaaaaaacaaacaaaaaaaacacccaaccctatataggtattattattacttctataggacacatagaggtttggaaagattaaatcacttgaccaaggtcacaaaataagttctgaggctgggatctgggattcagtcttattatatgcccttcctctaccactccctaaaacttctcattccctcaatccccatatatcatcttaaaatctgcaataaatagccccatacattcgttggcacttaggaaactgttaccagatggctgagtaactgtattaaaacaaatttaattctgcttctatctttgccttgcacttcctgagtgacaggagtgaactctcatatccttttctgtcaaaagatggtgctgaatgatttctaaggtagtttacagttccaacattcaatgccattttgctaacaagtgggcagtcaacaggcatattcaacagaaatactagtaggatctcaggctaaacatacgaattcaaaactctaaaacaatcacatccccctggagtgtaaagaaaaaaatctaaaattacaaatgcctggagttgtttctagccatgatatttaacttatttgagattttaaatagcccatttttcccactgatcacaagtagaaattctgggcagtatacaaaaagcaagtactcaaggactccaaaaagtaaacaaaagcaggtggattgtgaagagggtcaaaactgggagaggggcccctcctggggagtgggttttcaatgttttccccttttttcctcccagctctgccctgacgtcaggcctcaggtgcagagctgcactgcgtggtagcacaagccctgagttaacaagagaaataccggctttctggccagaggaatgaagaaaaagggcccctgcgggcaggaatgtgtaggggaatctccaaactgagagtacaggcggaaattccctaattctgagtctgaaccctcaggagtaccaggttacccctgagctgcacatgcgtgtgacatgccttaagggcacagcaaagactttgagaactgaatgaagattagatcttttaaaattggaagacttcggccaggcgcggtggctcgtgcctgtaattccagcactttgggaggccaaggcgggtggttcacctgaggtcaggagttcgtgaccagtctggccaacatggtgaaacctcatctctacttaaaatacaaaaattagctgggcatggtgcctgtaatcccagctactcgggaggctgaggcagggagaatcgcttgaacccgggaggcaaaggtggcagtgagccaagattgcgccattgcactccacctggacgacaagagagaaattccatctcaaaaaaaaaaaaaaaaaaaaaattagaagacttcatttttctgtattggccaaataactgttctaatgcccttcattccaataaaaggtttgtagcagcttacagagataatttaaaacaatttttaaaagaagaaaacaacactgggtcagagagaaaatatggttaagaaaagtaagtgaagccaaggagtgaaactaatggaaactaatggacaacgtgaatatcttaaaaaaaaaaaaaagtggtgcgctgtcttatactggctagcaagagcagattgcaaagtattcaggatttttgaagacagttgttaactattggtaacttgatattgaccactatggaagtatttatactatagaaatcagcaatgctacaagtcagaagcattgtttttcttcagagagccggtttaacaggacacatatttatcagccaactataaatggataaaaaataattggctccaggccataggatagtgaaagcaaagaaggaaataaaatgaggtacaagattcataaaattcattttttaaaagttgccagaaaaccaaaaattatatataatagttcaagccacacagaacatttactcaaataggacatgcatcattccataaaggtaacgccaataaattccagagtatcggtatcttagaaactatctatattctaggccaggagcagtggctcatgcctgtaatcccaacattttgggaggtcaaggtgggcagatccctagagcccaggagtttgagaccagcctgggcaacatggcaaaaccccgtctctacaaaaaatttagctggatggggtgcacctgtaatcccaactagtcagaaggctagacgggaggatcgcttgaacccaggaggcagaggttgcagtgagctgagattgtgccactgccctccagcctgggcaacagagtaagacactgtcttaaaaaaaaaaaaaaaaaaagaaaaagaaagaaagaaactatattctgcaaccatactgtaataaaattagaacttgataactaaaatatacttaaaattgtaagtgaacaaatatatttatcagtaacatggatttaaaaggcagtcgtggatgggagcatcgctggagtccagaagatggaggctgcagtgaggcatgattgcgtcactgcactccagcctcagcaatagagtgggaccctgtgtcaaataaataaacagcagttataaagaaaattaactcttttagaaccaggtgttaaaaatgttacacataaaatatacatataaaataatattataatttcaaatacatttattagaacaagaaaagttaaaataaaggacctagaaattctactcaaaaatttggaaaaagagaagttgagcaaacctaaagaaatacgaagaaaaggagttataaagataagaatagaaagcaatgaaacagaaatagagaacaaaaaactaggtagtgaaaattaacatacttttgattccaaaagctgcttacttaaaaatatttgtaagatattcagagttacaacaaggccgattatggataaagggagaaaaaatgaataaacaaatacataatgaaaaagggggaacagctacagatatgacacagatataaagcatagagtgttatgaacaagtatatgctaataaatttgaaaacctaggtgagataagcaaattcctagaaacatttaatctatcaaaattagcacaaaaagaaatacaaaacttgactataccaatgagtattaaagcaatttttaaagttatcaatggcatctaataaaaaaatatatttttgaaaatgcccagatggtttcacagatgagttctatcaaacattcaaggaacatgaaacttctatattatatactttttccagaaaacagaaaaaaactaaacctgattagctaattttatcagccgagtgtaatcttgactccaaattgagttgtggaaaactcaaggaaaaaaaaataatagacccatttcaccttgaacacagatgggagaaaaaaataattatttatgaaccgaattcaacaatattacaaataataatactgggaggccgaggtgggaggatcgcctgaggccaggagttcaagaccagcattgtcaacatactgagatcctgtgagatcctgtctctacaaaaaattaaaaaattagccaggtgtgatggtgagcacctgtagtctcagctactagggaggctgaggcaggaagatcatttgagcccaggagtttgaggctgcagtaagctatgattgcaccactgcatttcggcctgtgcaacagagcaaggccctgtctctaaaaatatgtataataataacaataataataatgattatgctaataatgatacatcaagatcaaatagggaatccttggaatactagggtggttcaatataataaaacatattgttgctataatttaccatattcatagaaaagtcatttcctttgctcagtctattaataaaagacatttggtaaagtatatccatttgtgatttttgaaaaacagttaaggaagcaggaatcaaaactttcctattttggcaaaggttataatccaaaaaatctgtaaccactagtatacataacggaaaaaccttgggtatccaagacaagaatgttcactataattactagcttatcatagcactaaaaactatgggcaacataacaagaccccatttaccaaaaataaatttaaaacattttaattagctggcatggtggcatgcacctgtagtcctacctacttgggaggccaaggcaggaagattgcttgagcccaggagtttgagcttactgtgagctgtgatcacaccactgcactccagcctgggtgacaaaggaagaccgtatttctaaaaaataaaaaatacaaatacaactacaaactagcactagaccaacagtgactatgtaccatgaactgaggaatattattaattccaccatttgcatctgaggttaacaatatgtcaatgacttaaataacatcatatctctgagagtaatttctcctatatttccatgacaaatgttagataattttccattttttccattcaataaaataaacaggaaatataattaaagagttcaattgaggattgggatttagaaaggaaggcaggaattaagaataatccttagttctcttcctaatttgcacctctctcactgatacatatgtattattttctttttatgtcttttagaatctaataaacatgttttatattatataacaaactagaatatatggattatctttggtcttccttaccaagttcttaactctgctggctctggggcactggacataccatgtaagaagaaaaatgttttaactccattgaacttattcagaagcatcggaaattggttcagcaatattcaactttgcccagcaatgtttatgaaagtttcatatatagtatagtataagtatgtgtaatacagaatttatgttctcaaaaatgaagagataaagtatggagattctaaactctgttgacatagaagagggtggatttctcgaagaaacagccttctatagaaagtggcttgtatgagtcgggattctccagagaagcagaaccaataggatgttggcagagagagatttattttaagtaattggctcatactactgtgggagctggcacggtcgaaatctgcaggtaggctggagacccaggaagagctgatgttgcggcttgagtctgaaggtggtccagaggcagaattccctcttccttggaggacctcagtctttgcccctaagaccttcaactgattggaagggccacttacattatggagggtaatctgctttacccaaaatctattgatttaaatgtaaatctcatctaaaaaataccttcactgcaatatctagactggtattcaaatgtctagaaaccatagcctagccaagttaacacataaaattaactatcacttggctcaaggtgaaacttccagatcaatgtggcaggagtgttgaggaaggaagtgaactcggttctaaccaagtaggacagccgaatcatcactgaagtgtggcactggcctttcgccaaggtaacatgtggcaaggttttaggttaggataggtaccaggcaaaagctgggtgactcgatggaggcttttgtgccaaccttcagagactggctgcgtcagactgccctcaagagcatacaaaggaaaaaaagacaaattaaaagcctttaatccaaactcaagacatgaatgaaaaactgtaaatgcctctatagcagttttaaaggctatcttttctcctgcaacccagcacagatatggctgagggtcaagcccgggggcttatgataaaggttatgaagttgtagaaatgtttgttgcatcatccaacagcagctgttgtgataaggcaagacccctggttgggatagaccggaccctgagatatgaaatagggacatatgagcagacacagagaagtctgagtgagaactatgaatcaccgcaccccctgagggtccttgctggaagaagcagactcaccgtattagttacctattgccatgtaatgaatgacacccgcttaaaataacagacatttactataaggtgttactgggacaataggggattttttaatatggattgtgtgtttgataatatggtatcaattttaagtatcttgggggtgatgacagtattagggttttgcaggagaaatgtccttattcttaaattatacatgacaaaatatttaggggtcaagtggcataatttccacagattactctcaaattgtttaacaaaatggttcttcaacagtaaatggataaacaaaacgtagtctattcgtgcaacacagtactatgtaaacaatgaaacttcatcaactactgaaaatgtaacaacatggacgaatctcatagaaacaatattaagtgaagaagccagacttgcagaaatacatactgtatgtttccattatctattgctgggcagcacaccaactccaaacttaatggcttaaaacaaaaataatcattttattatctctcatgaatctgtgaattactggactttaagagccactgatgtagtccatgaaccaaaacacatattcacggcagccactccacccagcacctcacacctgtgatgtttactggctgcccatgggatttgaacacctttagagtactgtgaaatttcccctaccttttgagtcctgcctccctaaagtggaaaccagaaagctcacttcccctagccttctttgaagctagagcacctaagttccaccaattaaattcatccacctaagacttcagttacaaaggggccacaggaggaaccagggtgtgggggttgcagagcaccttttactgtatttatttctctggcaaaggtgacagaagaagcaactgtcttttggggaagcggtgggttttttccttttttttttttttttttaagtgaagttcctgaaacagaagtggtttaggaggtgtcttcagtggtggctgcagcaacctccaggtcctaacaacagaaccaacagcagcgtctagaagccatggggcagcagcagtggtgtggctcatcagacctgctctctgcgtggtctgaccctgtacatacatgtgcctctcatccgtagttccagcatttcctctctaaagtctagttctgagagaaatttctttggtagacttttcaaagttttatcaaactcaaagagggaaccagcaagaatacaagagccttgatccaaagagtatttgaaaaacagagctgtatctctctgtgaggaaataatttctaggctagagattcaaaatggctaacgtgctagagggcaataaaatcataaccttggtgttatcttctttaccggagaaaaagagaaagccagcatcccttatcagctctctgctgattaacctctaatcgcacagggctggccgggttcgtcttaggcaaattacaatccctgaaacactctggttttgatcaggcagaattatgagcaaaggttcaagtgtgatataaaataatcaagcacgtacaattttgccttatttataattttgaaacacttttcctacacaatttctgaccttaaggggcagaattaaccaaataaaacttttcagaaatgctctaattcagttccactcattttatcgtctctatttggcctgttttagggctaaacccagaagcaaaatcttcttcaaaatgaatgtattgacagtcaccatgccagacttggagtacgaacaagagcatccttttacccttactgaaacctatgtggtcactaaaacatatatcaataatatttttaacctggacaaaattaatctagaaaattgagctactgttttttatttgtcagcttttaccacattgtgggtttgagacacaggtagttcttttgatagtacagcgttaatttaaaatataaaaatcatgccaaacacatctaattacttttagcttccttcacagtaggcggaggaaggtgaaaaattaagccttttgcgccacctagtggccaaatgggtagtggctgtctagtgagaaaaaacaaagatttgggggcgtgaaaaatagcttgacagtgttagtattctgaattcagggtatgaggttggaagaaggcaacaacaaaaaagaattttcagagaaactggtcacttaagtgcataggtacctgagagtgagcaattgttataactttgatatctcaataaccagagtgacaataaaacatttgaaaataaacataaagaaggtaacaattataagaaactttaggtgtttcagaagcaaatggttttttgttgttgtttgtttttaaaataatttaaaaacttgatgctatcagcacaaagcactaaaagttatcaaggtattaagtgagagcattctgataagaaaccaccgctagctgggcagattatgctaaagggaaagaaaaagttttttctctgtcttaagtgtagagtgtatattccaagatcaattttaaattacaaatcctctccttttttgcttattaattcgaattcatcattacgtgtgtgttttacagaaatacatatatagttgaatgacaattttgtttaaaactttccactttagttttaaaacgtagttaatcttatcaatacaatacatgaatgtatatccacactaagtttaccaccttaatttgagttttgcaaaaattaaatatggacaaaggtatatatatagaaagccacttagtgacccaataatctttctctctatgatacacttaagaattttttagacaataaaaagtcacttattaactagctcagtgaaaattagtccaaagtaacaaaatcatttgaggctgcaaaacaacaatatcactattgatattaggagtttttcaaagaggtaaaattctaaaatttttacatagagtgcaagctaagtagctaagtcaaatgacttgcaatatttttctgaaattcacaagagccaatagtttaaaaaaagcatctcataacatttaattaaaaatatacattttcatttaagtttgcttcccacaaaccactgacacactcattgacacagtgaatgagtctagtgacaagaaacaaatcctttttgttaggtcacttctaacactctgcctccaacaaaataaagaggacctattcaagctgtcagctattatatcatttaaagtaattttgggaaggaggccaggcaggaggatcgcttgaggccaggagttcaagaccagccctgggcaacataatgagaccctgtctctatgaataataataataaaattagtcaggcatagttcgatgtgtcatagtcctagatactctgaaggctgaggcaggaggatcacttgagcccaggagttcgaggttacagtgagctatgatcgcaccactacactccatcttgggtaatggggccagccaaacaccacagaaaaaactgcgactccacccccaccagctaaggtcaaatgaggagcctagactttcaccctcaccaggctgtcataaggaacccaacacttcaacacacacatgcacacacaccaggatggtgtcagagaaagtgaatagggagtcaggatggtcatgccctcttggtgaaaatgtactcctttccccaagcccctgaaatgtcaatggaaacctagacttccattcctcacccaacagtaatgaagcatctcttcccctctcctctagggtgatgtcagacaatgcctaatggagagtcaggattttcatcaccacccagagttaatccagcaaccactccctgatacctaccactcactcctccactccactgtcccatcttggtgtcaataaaggtcatgtgagggatagtaagtggcactcctctcccaaccaaccagggaggtattagtgggcacctaatagggagccagaatttctgtccccactcagtaataatggggacctatctgaggtgtcaatgaaggcagagtgagaagcctggactcctacccctacctggcgtcatgaagctcacctgcctacctgctggagaggtgttaaaagaagccagctaaaacagtttaaataagaccaatagccttataacataatgcctgaaatgtccaagtttcaattggaaattatttgtcatatcaggaaccaggaatatctcaaattgaatttttaaaagacaataaaatagatgccaaaacggaaagaaaagcctgatgaagattttaaagccaccattattaaaatgctttgatgagcaattaacacttaaaagaatgaaaaaaataggatgtccagttcagtggtttaaaaaaagaaagaagaagaaaagagcagaaaagaaaaaaataggatgtttcagcataaaaataggatatatacggaagaaaacgtggaaattttagaactgaaaagtgcaatagccaaaataaaaagcccagtaaataagctcagcagcagaaggagagaacagaggaaagaattagctaccttgaagacacagcaatagcaatcacttaatctgaacaaaagaaagaaagaaaatacactggaaaaaatggacaaagcctcagggacccatggggctataacaaaagatttaatgttcatgtactcagagtcccaaaatgagaggaaaaagagagtgaagctgaaaaaaattatcaaataaatatggttgaaaacttcccaaatttggcagaagacataaacctagtgatttaagaaggtgagtgaaccccaaataggacaaacccaaagaaagccacaccaaaatcatagtaattaactaaaaattaaagataaaaagaatcttgaaagcagtgagataaatgacatctaacaggtgaaaaaaatgacagagcaaaattttcatcagaaactgtgtaagcccgaaggaggtcaccacctttttccagtgctgaaaggaaaaaaaaatatcaacttagaacactatatcagcaaaaatatccagggaaattaagacatacagagatgagggaaaactaacagaatttgtcactaacaggtctaccctaaaaaaacaaaaagttaaattgaggacagttggaacatcaggaaggaagaaagaacatggcaagaaaaaatatgggttaaaaaatggactttacttcttctcttgagttatttaaattataggattgaagaaaaacgtataatactgtatcatatggttataaatgtatatagagaaaatattacaggcaattataaatgagggagggtaaacaaagagagaagaaatttctacacatcactcagactggtaattaatgacaataaataagttacataaatataatgtaatacctagaacaaccactaaaagagctatccaaagaggtacacacacatacacacacacagctatagataaattaaaatggaattttaaaattatttaggaagcaatgaaaaagaaaacaaagaaatgaaaaacagagagaacaaacagaaaacagaaaataaaatgtcagacttaagcctggacataacaatattataggaaatataaatcgcctaaatacatcaattttaagagacagagcttggcagaatagatttaaaaatatgactctgtcaggtgcggtggctcacgcctgtaatcccaacactttgggaggccaaggcaggtggatcacaaggtcaggagatgaccatcctggctaacatggtgaaactccatctttactaaaggtacaaaaattagccagctgtggtggcacaagcctgtagccccagctactcgggaggctgaagcaggagaatctcttgaacccgggaggtggaggttgcagtgagctgagatcacaccacttcacaccgctgcactccagcctgggcaacagagcgagactccgtctcaaaaaaaaaaaaaaaaagactcaattatttgctgtttatgataaactcacttcaaatataatgatataggcggtttataagttaaaggatagaaaaacatatatcagacaaaaaataataaagggaggctatattaatatcaaataaacttagaacaaagaaaattactagaaatggataggaacactatgtaataataaaagggtaaatctaccaaaaagacatagcaatcttaaatatgtatgcaccaaacaacagggctgcaaattatgtaaagcaaaaactgatagaactgaaaagaaaataggcaagtcaacaatgatagttgaagacttcaatagttttctctcaacaattgattaaacaaatagacaaaaattgagaaaaaacatagaagaataaacaacatcaaaccataagatctaatcaacatttatagaacacaccacccaacaacagaagatacattattttctttttcgttgcttttagtagattccacgagattttcctttttcttttttcttttttttccttttattttaagttcaggggtacatgtgcaggtctgttacataggtaaacagtgtcatggaggtttgttgtacagattatttcatcatccaggaattaagtctagtacccattagttatttttcctgaccctctgcctcctcccaacctccaccctccaataggccccagtatgtgtttttcctctttgtgtccatgtgtccatcatttagcccccacttatgagaacatgcagtatttggttttctgtacctgcaatagtttgctaaggataatggcctccagctccatccatgtccctgcaaaagacgtgatctcattatttttatggctgcatagtattccatggcagaatacactttttttttttttttttttgagatggagtttcactcttattgcccacactggagtacaatggcacaatctcggctcattgcaacctctgcctcccaggttcaagcaattctcctgcctcagcctcctgagtagctgagattacaggcacacaccaccatgcctggctaattttttatttatttatttatttatttatttatttatttattttttgtatagatgaggtttcaccatgttgatcaggctggtctcaaactcctgacctcaggtgatccacccacctcagcctcccaaagtgctgggattgcaggcatgagccactgcacccagccagaataacatttttttaagtgcccacagaatatatgccaagatagaccatatctaagacaataaaagaccaacaaattttttaaataaaatcataaagaaagtgttctcctaccacaatggaaccaaaccagaaatcaacaacaggaaaatatctaaacatttggagacaaaacaacacacttagaaatacatgggtcaaggaggaagtctcaaggaaattttttaaaaatacacacaataaacacaactaaacaaaaatgaaaatatgccatatcagaatttgtgggatacagttatagtagttataagaggtaaatttaagttccaggatacatgtacaggatgtgcaggtttgttacataggtaaacatgtgccatggtggtttgctgcacatatcaacccatcacctaggtattaagacaagcatgcattagctatttttcctgatgctctccctccctccaacctcgccccagacagaccccagtgtgtgtttttcccctccctgtgtccttgtgttctcattgttcagctcccacttataagtgagaacatgtggtgtttggttttctgttcctgcattagtttgatgaggataatggcttccagcttcatccatgtctctgcaaataacaggatctcattcctttttatggctgtatagtattccatggtgcatatgtacattttccttatccagtctgtcattgatgggcagttgggttgattccatgtctttgctattgtgaatagtactgcaatgaacatacaagtgcatgtatctttataatagaatgatttgtattcctttgggtatatactcagtaatgggattgctgggtcaaatggtatttctggttctagatctttgaggaattgccacactgtcttccacaatggttgaactaatttacattccatcaacaatgtaaaagcatttctatttctccacaaccttgtcagcatctgttgtttcttgagttttaataatcaccattctgactggcgtgagatggcatttcattgtggttttgatttgcatttgagaagtaaatttaaagcactaactgcatacattggaaaagaggaaaagtctcaaaccaataatctaaactctcacctcaagaatctagtaaaagaataacaaaataaaaagcaagcagaacaatgaaactgaaaacagaaaaacaaaagcaaaaaaaaatcaatgaagcaaagagctggctctttgaaagattaataaaattggcaaaccactagcaagactcagaaaaaaagacgacagaagatagaagctaccaacatcagaaatgaaatgggatatcatcaaagattctacagacatcaaaaggataacaaaagaatactatgaacaattctacacacataaatttgacacttaaattaaatggatcattttctcaaaaaatataaagtgccacaactcactaaatataaaataattcaaaaatgtctacacctattgaggaaattgaattcataatttaaaaactcacaaaaggaaatatttaggaacaaatagtttcaatgaagaattctaccaaagatttaaagaagaattaacaccaattaatctcttccagaaaatagaagcagaggaagcatttcccagtttattttataaagctagaattacctcaataccaaaaccaaacaatgacaatgggaagaaaagaaaactgtagactaatattcctcatgatgcagcaatctttaacaaaatattagcaagtggaatttaccaacatataaaaagaattatatacaatgaccacgtgagagttatcccagggatgcaaagctggttggatattcacaattaattaatgtaatccatcatattataggctgaagaggaaaatttacttgttcatatcaattgatgaagaaaaagtatttaacccactttaacacccattcattatttttttttaatctcagaaatataggagtagaggagatctttctttacttgataaagatcgtctacaaaaatcctatggtgaacatacttgattctgaaagactgaatagtttctacctaaaatcaggaacaaggcaagaatgtccactctcaccactcttattcacagtgttggaagttctagacagtgcaataggcatgaaaaaggagattaaaggcatacagattgtgaagtaagaaataaacagctcccatttgtaagtgacatgattgtctatgtagaaaatcacaaggaagctacagaaaaacttctagatatgtgatttcagcaaattaacagaatacaggataaaccagtatcaattgtatttctacatactcacaatgaacaaatgatacatatatatatattttttttttttctttttttttttttttttttgagacggagtctcactctgtcgcccaggctggagtgcagtggcacgatctcggctcaccacaagctccgcctccggggttcacgccattctcctgcctccggagtagctgggactacagacgcctaccaccatgcccggctaattttttgtatttttagtagagacggggtttcaccgtgttagccaggatggtctcgatctcctgaccttgtgatccgcccaccttggcctcccaaagtgctgggattacaggcgtgagccaccgcgcctggcccaaaaatataaatatattatttacaattactcaaatacatgaaacacttatgtgtaaatctaacaaaacatgcaagacttgcaagctaaaaactatgtaatgctggtgaacgatatcaaagaagatctattcagtctctatctatgtggagagaaatactgttcatggattggaagattcaatatagtaaatatgtcaattctccccaaaccaatatacaagtttaacacaattccaatcaaaatctttgcaagatttgttaattataggtaggattactctaaaatttacatggaaaggcaaagggactagaatatctaaaatattcttttttcatattattatattttattgtagtatgtgtagtgtatactaacttaaagggaaaaaatgtaaacaaaatgaaagacatggggaaaatggcatcttgctttaatcttcaacttaaagttacccttaacaattcatttataccattatgccaaattgtagtcatccctgcagaattttagacaaatgaaaatggacaaggtaacaccaaagagattaagcacagaaagtgatattgattaaaaagttgaaagtaaaatctaccttggctggaactgaacattcagatccatctctagaggaaaatctaacatgaatcatatggttcctattttgactagttcatagcatatcaattagcaacttatgacttgaaaatactttttctcagctgcatttgactacctaaaatcctaccgagcacgctgtttggcatgtcttactcctctgaaatcatcatctactttctaaaaaccagaaaattagtttgcttgtgatttaaaattcaaaaaagtttgtagaaaacacaaaaagaatcaactatttaaagtctcatccttttcttctctctaaaacagctacttctactaaaagaagagtatgtggatactttctaagaactcaaaaacgagaaaaccaaaatcagagggtgcatgaatatatgtgcacaggtatgtacagatttaatctctatattccctaaaacatatttaaacaggtaatcccagcattctaaattcagaaagcaaaaataaacagttttgtttctaaatcagtggtattactagctgaaatgtttagtagaatactgcacctatagttcagcagtactttgattatgtaccatttaagaaatcaaaataataagcacattcttctaacagcaaagaattgtcccactttttattttgacatattgatatttccataaacttgcaagtggaaaataagctgttcaataaaagccttcttacatatataatatacagaaattattttagaagtctgttcatataacagattattttggcactaacaaaaattgtatacaatccatcagttgtatggctagaaatgaaaccatcactaaaccaagacacacagggctttcctgcacttagtttcaggaaaaagttccaagtaattcttactgtgttagaagaataaagtacatttgtcatagtatacattatcatattcccttaaagcagggactaaagtttttaaattaaacaatgtccaggcttacttctgtctgtacattcaggaataatcatatcactggttacatacaattctctcctcatgcaaaaaaaaaaaaaaaaacctcaaaaaaaaaaaacctgttgttttcttaagtctaattaagccaaacaaactattaatagcaatttaattagcaagctataaatcagagaggtataaaaattcagcagttaaactgtatttcccacctatagtactgctgctactcaatcattttcttcatgtattagaagaattaataggcattgatggtcaaaataagaatttcaatattgcagcaaatgacagaagagtgagcgaaagagttcctaatgtgtgacagtcttaatgattctttaaaaggtaaaggattgtatgcatgtgtgtggaaaggagtaggaaataaaagtaggaggttaagacaggtatttaaagggaatgccaagatagctgcattagaatctttattttttaaaaaactgaagtctgcccagagtaccaaaaacattaaaaaaaaagagcagacattggtgcaagtttaacctgtgagaaaaaagctagttttgatgagaaaaagttcagtcttttccttgtaaatacaaagaaatgcaacaggaattttaaaggtagtaggccagaaaatgtaacagtaactcttacaatccttttctttttttttttttttttttttttttttttttttttttttgagacggagtctcgctctgtcgcccaggctggagtgcagtggcacaatctcggctcactgcaagctccgcctcccgggttcacgccattctccctcctcagcctcccgagtagctggaactacaggcgcccgccaccatgcctggctagttttttgtattttttttagtagagacggggtttcaccgtggtagtcaggatggtctcgatctcctgacctcgtgatccacctgcctcggcctcccaaagtgctgggattacaggcgtgagccaccgcgcgaggtcacaatccttttcaattaaacagacaaatcaagttgaagacaagtgttaaaatactattcagcctgaatatttatcagcatacatatcctgttgttcaactggcttttggttaaaaaaaaaaaagtcaacaaactttataagagctatcaccacatttagagtgatgaaaataaattagttcccccccaaagatattgtttaacctctaaagcatgaaaagctatataatatacaaattaaccagtatttttacaaaagtaatacagttttggactgatgatattacaccgtatttgtggtaaagtactaggcacaagaatatatatatcaattaggcattttcagtctaatcagtctttaaggttttcatttaattcttggcaatatataataactggtatgcactttggtacttaagtcatgacttgtggagaacgagaagcaatgtattatagcaacggggttcatatctaacaaacaataagagtgttgaacaaatcccttctatgaacttcgtgatttattttgctgttggtcacttgcagtagatccttgatttgattcttccgtattcatgctttctccatgtgcagtctctaacatttcttcaactttgtcatcatcgtgtaggtcttttgaaattaattgtctagctagtttgatattgagtccttcattgtagtgaagcgtccttctcatttcaaattgtcgctttttttctcgttcttcaggtgagaggtcactatcctcctctccactgctttcttgttcctgaacctgatactttggctccaagccttcagcagcagctaagttcttagccaagctatctgttgccatagcttcagtggtttctgtatcactacatgcatcttc

SEQ ID NO: 565 - DNA, 7605 bp, Homo sapiens
attttcaggttgattgatgtgggacagcagccacaatgaggaactcctatagatttctggcatcctctctctcagttgtcgtttctctcctgctaattcctgaaggtaagactgattcttctcatttccattatgaccatgaagcaaaatggagcagactttcaatgaacttttggcaatattaccttcctatactgaaagaagatgttttcccccaagccttataatgtttagccaggcacaatggcacatgcctgtagtcccagctactaggaacgctgaggtggaaggatcacttgagcgcaggagtttgagtccaggctgggcgacatagtgagaccctgtctctattttttttttttaaatagcattctttcttggattttaaatatgtctgtattttagaaaaaaaaatcttttcttctcataattattttgcaaaagatagcagaaccaccaatgcttattgctgccaatttgtaacttgaaaattgccaaaaaggacaatgtaaaaatgagttaacaaaactctcttgttcgtaaaacaaatagtaccttccaggaaaggaatagtggcaacttagtcagctcagcctttcctgctgcagaaaatgcatagataaagacaattaagacaaatctgacctagacaccaaaagtgaatcaggaattattagaatttttatacttatttctctggtctagagactctttggcaataaattaaggcgtgaggccagttccctcattaaccctttgggtgtgctatagtattttttattaagctaattttttgtctaccaaatggtaaccaatatttctgcttttgtgtgagttgagcatgcatgggttaaaatgctgtataattcatggtattaccactgaaagggtgacagctcttggggagctctagatttcccttgaagaacctgctaggaagtgaggactactctcaagctgtggcaatatggagccagccacggtttttcccaggattcatcagcttttggaggcagggacttatgtaataacctgccttgccaggaattcccaaagaactctggtttatcatatttaggtgcatatctggtttatgcacctaaatatgagaagactttgggaggctgaggtgggtgtttcacaaggtcaagagatggagaccatcttggccaacatggtgaaaccttgtctccactaaaaaaacaaaaattagctgggtatggtggcacgtgcctgtaatcccagctacgcaggaggctgaggcaggagaatcgcttgaaccagagagttggaggctgcagtgagctaagatcgtgccactgcactccagcctggtgacagagcgagactctgtctcaaaaaaaaaacaaaaaagagagagagagagaagaaatataaaaataacaaggctgcaggacatttgggacaaaggttggctatgttataagcagggcatagtatgactatattcaggcatgttaaatcctccataacagaaaaacacagggcagataaatccagccatatcttttcttcaaaggaaaacaacaaaagcaacctgctgtgctcctctttgtttcctgtgttcagagagggcagtgtgggcccatataaggaacagacagcaaagcaaggcacagttgaaatctatctgtacatgaatcaccctaggaaaattgggattgggtgaaggtcttttgtttctataagctctttacccttttgtttctagagcctagaatttcttcctcccagtttcctttttaaaagcagagacctctgctttttcaaatcacactagccacatttcatgtggtcactctcctccttgctcttaccctcatcaaatcttacgaaaggcttctatagctgtcattaatacttgcctgtgaatttggcaatgacttagtcctaattatggaacaagaggcactgtgccctattcaagaaaccatgagtctcagcaaaactattttgggagaatccaagaacatctggtgcaggaggtggagcactcggagtgtatcactaagacataaggttctctctatctgcatgtatggtttgccttgtgtttagttctcactgttccttaacaatgggtctctacttcaagactatcatcaaggaaatgtcacttaggcagaattcttggcatatggtatcttctctcttctcttccctatctcattggaaaagaccttagattaaaccccatggtttggtctagagattgaaggggaggtgcaatcgatgttattttcttaacttatgagtgagaacagtgcagtttaataaccaaaagtctcataatgaccaaaggactgaggggtagggtcacagctaaacgatgctaatatcggttcataagctatatttttgcaatggcttggggttaaaagggaagttatgaggcttctaaaagtcttatctatttcccccaaattaatagttagccaaaaagggtgggagcacttgaggttgtcactaccactggcatttcctgcagcaactgttgatggtaaagaccaaggcagagctttctgccctggggcctgaggttgctggtttgtgacatccagcctaatgatcctggaacagtcaatggcctcgcttctgtgggtggaaaaacaggaccctagagtccaacaggaataggatttgcatcagatgtctgcgggtctacatagagtaaaagcaggggaaatgctctcatccagacttcctctctgagtgcaaaaagcatggctggtcttagaaacatgactttgtgtagagctctttgggggtgagcaccaatctgatttgtctttttccattgaacagatgtctgtgaaaaaattattggaggaaatgaagtaactcctcattcaagaccctacatggtcctacttagtcttgacagaaaaaccatctgtgctggggctttgattgcaaaagactgggtgttgactgcagctcactgtaacttgtaagtgcctgggtttttaaaaaaaagtttgtaaagatactctaatttggggaaacattaataaaaagagtaggccgggcacagtggcttacacctgtaatcccagcactttgggaggccaaggcaggtggatcacatgaggtcaggagtttgagactagcctggccaacatggtgaaaccccatctctattaaaaatacaaaattagccaggcgtggtggcgcatgcctgtaatcccagctactttggaggctgaggcaggagaattgtttgaacctaggaggcagaggttgcagtgagccgagatcgcaccattgcactccagcctgggcaacgagagtgagactccatctcaaaataaaataaaataaaataaataaaataaaataaaataaataaaataaaataaaataaaataaaataaaataaaataaaataaaataaaataaaataaataaaataaaataaaataaaataaaataaaataaaataaaataaataaaataaaataaaataaataaaataaaataaaataaaataaaataaaataaaataaaataaaaaaataaaataaaataaaataaaataaaataaaataaaaaataaaataaaataaaataaaataaaataaaataaaataaaataaataaaataaaataaaataaaataaaataaaataaaatataaaataaaataaaatataaaataaaataaaataaataaaataaaataaagtagatcccactgaagccatgggaggttcatatgtatcttcacatcgcttaagtctttgggcacttgcttgagcctaaaaggaagttaggcccacacttgccacaaagaatcaggcaatgaggaagcagcatccacaagctctttctgtacatctccactgagccattgggtacaggtgctgcagagctttgcttctgtcatgactgcgtgaccaggtagaattagcctcagcatggaagggtgaaactttcagtgccccctcagagccctgggtgcaaccatcaagtacagaaagcttgtgtccaatgaccttcttgtatgcctccgtgaattcctctcacatctttggccatctcttcactcctgtcgaccactacattcaaacctcttcccaggcctggtcttttcctactctctaaatcaagcctctaaacctaggccattcaatatgataggcactagctacatgtagctatgtaaatttcaatcaattaaagttaaataaaatctcaaattagttcctcagttgcactagccacatttcaagtcctcagtagccacatgtggctagtgcagattcatagaacatttcatcataaaaatatgctctactggaaagcactgttctaaggtctttttcttttattttttaattatttactttttattgacatataatagttgcacatatgttggggatacatgtgaccatttaagtgagactaatctcagctgatgtaatggaaaagaggcagtgtgcataatctggttggtgtagtttatactaggttatgaatgatagccttaatccaatcatcagtacatcagaaagcattttgattttgataaccaaaatgaacctttaagagaaaaaaagactcctggacccctccttcagaccaccatcccttcaacacactcaatgccaagcacactcaatgccaagcaaatagggtcctccatggggcaatctgtttctgaaagttttcccatttgagtttgttgttttcttgaaaagatcccttcagtgcattactttacaactattggctgctttttgcttctgtctctggactactgagatctttgcttcccatcacagctaataagtaattctccatcacagctaaataaggcaggggtagggggcagataagcacaagacttggctttgctgccatggaattctcttgtttttcaatgaacctagtttagctttttataaataagctggtgatgatgatgatgacgataaattcataaacattcttttattcataaacattcttttattctttaaagcacacattttctttctgagccacaaagaaatctccccacctccatatttacaaatgggacaatgaaactgatcagtatatatgctcaactgccaatacaaagaataaatccagtaaataatgttgtgtctgttctcaggaacaaaaggtcccaggtcattcttggggctcactcaataaccagggaagagccaacaaaacagataatgcttgttaagaaagagtttccctatccatgctatgacccagccacacgcgaaggtgaccttaaacttttacaggtacgtatctttgattgtcttctcaaaagtcatagaaccttctacaatctggccgccgacgtgaaaacctttccttggtgcccctgttgtaaaaactcacaataaagaggatcctgaaattttggactataatttaaaatgtaaatatttatcttatcccattaacactttatgtttttcttccaacagctgatggaaaaagcaaaaattaacaaatatgtgactatccttcatctacctaaaaagggggacgatgtgaaaccaggaaccatgtgccaagttgcagggtggggcaggactcacaatagtgcatcttggtccgatactctgagagaagtcaatatcaccatcatagacagaaaagtctgcaatgatcgaaatcactataattttaaccctgtgattggaatgaatatggtttgtgctggaagcctccgaggtggaagagactcgtgcaatgtaagtaaaataagatcccacgtttcagctattgaattaagtcatgcagacagagaaaatgtaatgtcatgctttgttttgtcatggcactggcttctacaggatcctagagctttttgaaataagtttaataaaaccccagtcaaataaatgaatgctcgcagctcaagtgagtcattaatcaaaaataagaagttcactgctagtgcatggggtgacctactacatatttttgattttttacaaaaattactaagaagcaatgtttggtctcatttttcatgttaacatacgtagatctaaacttgaagatatacaacacttatgagagctgaagtcagggttcctcaaggccactcagtactctttccccatttcagtacattccctctccttccccactacgttcctctgccatttaacatcggcatgtctgaaatgtctgtcaagcctggctgaatatttccagccagaccccatagcttcctagagcttagtttaatctgcagcaaacttcaaagcatgactcataccagaaaatgtgtaagcttccatcctagaaccccctgagaagaggtgggatagggccatgcttaaagatgagaatagaagaaacattttgcagatttttaaactgagtactaccttgcatttctcatttgtcccaaagaccctatagagccttacctgaagaagggtgtgcagtatgcatggtttggcagttaccagagactgagaaatccaaaggtctctgtccttccctagatctatgtcttgctttcagaaccaaagctagccaaatcccaggaaaagaaaacatttgtcttcagtacctgtccactttctcttctctgccctagttcccccattccctcccttgtccaccaccctgggttcccaggaacccagaaccttcatgcttttggaacccacatgcagcatcctaaggccacggcagcatcccaagacgctagtccccatcccaccagccacccgccaccaccgaaacttggcaatccttgcctgttctctcaacaccctggaattggctattgatgaattaaacctaaaggactaattctgcaaatgccagttactgtaacaggcaggggaaataaacctgttcagggaggatcccgggttccaacatggttctttatttcatatctttataaggccaacttttgcctgaaagggactgatttggttttgtttcttttggaaggcaattatctgctagaagaaccacaaaacatagtgtttattctttgcttcaatgtatcatctgcatttgactattttgccccttgagttattaagcattttgagaaaacgacaaataaacaggagactttcctttccaaaagcagagcaatagtctcaaaattagctgataacatgtacaagtttcacttcgattttcactggctcataaataaaccaagtgaaccaattcaaaaatattaaaatatttccaaacattttaatttttaaaattaaagcactatcttcaattaagtcaaggttggtcttaactgcatattaaatgctgcagaatttcttccatttcactagtggtaatgctgaacactgaccccacaccctacccctcttgttttcctccagggagattctggaagccctttgttgtgcgagggtgttttccgaggggtcacttcctttggccttgaaaataaatgcggagaccctcgtgggcctggtgtctatattcttctctcaaagaaacacctcaactggataattatgactatcaagggagcagtttaaataaccgtttcctttcatttactgtggcttcttaatcttttcacaaataaaatcaatttgcatgactgta

SEQ ID NO: 566 - DNA, 393985 bp, Homo sapiens
gcggcagccgccgccgagccggccggggcgcacggagagcgcgcgggactcgctgcagcggcggccgggtcgcggcgcacccgggccgggaccggagccgagcctagcgcggcgcccgcgacccgtcagccgcggctcctgctccctcgatcccgcgcggggaaagggccggcggctgttggcgtcggcggggcgcggaggaaccgcggcggcggcggcggcggccgcatccttgccgcccgccccggcccagccgcgtcccggagccgtcgggcatggagccgtggaagcagtgcgcgcagtggctcatccattgcaaggtgctgcccaccaaccaccgggtgacctgggactcggctcaggtgttcgaccttgcgcagaccctccgcgatggagtcctgctctgccagctgcttaacaacctccgggcgcactccatcaacctgaaggagatcaacctgaggccgcagatgtcccaggtgaggaggccggcacgggcgccccgcctccagccggcagctcccattaatcatgcggctaatttctttgtgtaaatgcaaacgtctaggtgcgctgagcttgccctgcttcccagccttctgctttgggaccacttcggcaccactttggcgtttcctaccttggcttgaaatggtttagctcctcaagctgaatgcgaaagctttgcgtccggagatggtgtgaggatttcgtaaaggctttctgtgaggcgggaaagaaataagttgtcttagggtgcccttcacctactctgcgtgtgtgtggcgcgacaaagggaatttgatcaagctcttctataataacgaaggggagggacgaaacgaggtgatggggtaatttgcctttagtctcttcttttgctttgcgtcttgtactcatgttttcctaaaagaggaaccatgacatacatgaggactcgaggaagtgaagggcgtttggtcccgttatctgtccaggagtgacattggtcaaagggaagaacagggagcagaacccggaggccgcccccagggcccctgagctggtggccagccggcaagctcccgtttacagctcttcctaagccatgtgagaaggagcgagtccagcctctctcagcagcgacaggaaatgagaagtttcactagagattccgctttccttcctgcagtgccctgctcaggtgctgtggtgccggtcggctcctggggctggagctgcctctttgagggttaagccagacacctctggaaggttgggtgcaccctagagtcagctcaaaagtcacagttcagtggaagagtagtttatttgtcctgtcggaaaatttttgtacagaaggatgttaaactcggttcagagcctctttctctttcagaatgttaaaacaaaacaaaaaaccaaactgctttcaacttaaaagggagaggacagagccctctccctgacacatttcagcactaatcctctatgacgcagagcctcagctacttagcaaccagagcagcgccttttaagaaggaacggactttatatgatttaataagtatgtatttaaagttagagcacacacagtcatctgtgattcttggtgtcagtgtttcatcagggtcccctgcacttcagattctgcattccttgcctgtttgccttcaacctgctggtgggcagtccctaagaaagaacaggcatggaagtggggagagccatacgtatttaaaagtgaggtaaattattttatacccccataaacatgcatggtgattgctacctctcggtaccccttcagagttgtctcaactctggaaattcctttgaggggtttggcagacttttctattatggtgggagctgcagttagctactctcacacatccccattttccactttgcctgtagcctcaggaggcagcgtgggtcaggatgccttggcccaccagtagggagtacagtactgtgcacatttcctggaacttgtttcctggaactctcagcagttgctctcaataatcacgttttctggacagctgaagacctttttaaacctcgaagcctttatttgaatgctaacaatggatgagaatcgttttgaatgtgtttcactcttctcctcttatgttagatgtaatttaatctttctgatgaccaaagattgtcattataagcatcattaatgaaaattgagcacatacaatgctctaagagttctgttccctagtgggggtagcaaaatgagcacaccaggatacttgccctaaaggaattattacactatgctatcagatggtaaatcactgggttataataaggtaagtaggacagctaatgaccttctttgtgccgttgcacttttgagttcttaagtctgttcaaccttgaggtttctggttccaaattaagtacagtttctcctgtaatgtcctatgagagggtgcttccctcaaatgtgaatcctagaaggctagtacctgagcctggtgatgtctgtttttgctttcctcatggttcttggcctcattgcagagaggcaaggctgctgaacaagtggatgctaggccgatgagtttgtatcatgcaggttgtcattaaatcctttaatgagacttatgaaatgattttatgaaacaacttgacgtatttaacatgcttatagtgcctagcacatgtacttaataaatgtttactattagcaaaattatgaaaaacattttttctgctattgttatattaagagtaataggttccaatagaaattttaaaacaattgtagaggcctaccggttcctttgggctgataaccctagacattttgccgctaactactcatctctttcttgggaaaggttctagctgtagtgaatacactattaacctggtacaaccctgtcatgtcccagcagaatgtattcccctggagttagagatgtcattactagtacttgtggcgttttggtatgtctgagagtcgttctgtctacttagattctgttgaagatattaatttgaaatagactattttttatagcacatgatctcctaacctgagaaataactggaagctgtcacttctgacttttgtgacatattgagactgtaaagagcagatgttgacaaaagaaattttaatttattgatgttttgtttgtagcctgtttagctttcctgaaagaggctataaaatgaccagccttttaaaatgagtgtttattccagtgagtgggatgcctttctattctctgttagccttctgccttgtttgcatttaaaaaaataaataactgcaaataatgactgctcaattataggtttgaatcttggaatcttaataagttagttgattatctttcaaaataaaagcatggatgggatcccagttttcttacttattgttctttctggctgttgacatcagtttgtttttgatcttgccatcttggtaagaggatgatcttcagttcaaaaataagtatattttttcatgctgatttagtgtttgtttttatttatgataggttaaagaggtaaacattaatcatatttagttatacatttaacatgttcctcttattatataatacagttaaataaaatgcagttggccagtgaatatctaagaaatttggtgtctgtatatgttagattttagtgtctatatttgagatttatttttcatctgaaacagtattctagccaggacacaaagcatgtgaatgattctggaagagaagagcctactggtgatagctgtactgggtgggcggcacatgctggggttggggctgggggtgtgcctgtggaagggcatgagttattggcttgatgtcacttttagtggttaagaagatcttcatgaatgcctataaccacccctagatctatcatgaatgagagtaccttagtcttagtttgaaacttaaaattttgctttatactatgctttatagtaggggtaatacagtcaatgagtttagtggccactatggacagtgtatgtaaactttgaattgtttaaatgaataattcagacttcaaggattccttcaatgaatatttacttggtcctactatgttccaggcgctgttttagacactgtcttggacaaactcaacaaagtccctgccctaaaggggtttggattttagtagagttgaaccataaataaatgactgtataatttatttatatatttatatttttacatacaatttattgtatataattatttatatatttatctataatgtgctatgaacccatttgaagctgagttaggaactagagagaaatgtaatacaattttatagaaggtagtcaagaaagtcctctccaagggagtgacaattaggtgggacctgaagcgagtgaaggaacacaggaatgtcaatgtttggaaaaaagaatattcctggtggagggaataccaagtgcaaagctcctgaggtcattaagtggcaggcatactggaggaacagcagggtcagtgtggttggaggagagtgagtgtgggaaagagtgggaaacgtgaagtcagagagaaaatggaagctcgatttttaggacttgtgggccactttaaggactttggatttcactttgagtgaaatgagaggtcaacagagggatgaggagaggagtgacatggcctgatttacctttcttttcttttctttttttttttgagacggagtcttactgtgtagcccaagttggcgtgcagtggcctgatctcagctcactgcaacctccgcctcccaggctcaagagtttctcgttcctgagcctccagagtagctgggactacaggcacgtgccactactcccggctacttttttgtattttagtagagggggtttcaccatgttgcctagagtggtctccaactcctgagctcaggcagtccacccgccttggcctcccaaagtgttaggattacaggcatgagctgccacgcccagccctgatttacctttcctacagttactttggctactgcattgagaacagactggagagcagcaaggatagaagtggccaggctaatacatcattcaggcaagagatgatggcggcttttaccaaagcaatagcagggcagatggtgggaagaataggctctgaatatattctgaagatggagccagcaggggtttattgatggactagattagggatatgagaagagaggagtcaagtatgtctccagaatttttgccctgagaaactggatgatgaagttcccatttactgaaatggagaggactagaggaagtatggtgttggggtgtatgtggggagaggggaaggaatatctggagctagttatgattgaagtgcctagtagacatctagatgggtacgccgagcaagttggaggagttggagatgtaggtataaagtttggagtcatcaaggtgaagatggtatttaaaatcatgagactgggtgataccacacagggagtagtgaagaaagaagaaaaagtctgatgagccattggagcatgcctgttctcgagggcagagagatggggagaacctgtgaaggagttgagaggcaatggccatgaggtaggagggaaaccaagtgaacagagtatttttgggaggagcgatgacatgtcaaatgctgctgatcaagtgaaataaggactgaggatagaagatttaaacaatataagtttccttggtgaccttgacaaaaacagatttggtgatgtggtgggcaaacacctgatagtaggagagggttgagacagcaagtatagacagctctttagggagtaattttgctgcaaagagaacagaaaaatgggatagtggctactaggggaaaagaaatcaatatatgggttaattaattaattaattaatttatttattttttagacagagtcttgctccgtcacccaggctggagtgcagtggtgagatcttggctcactgcaacctctgcctcctgggttcaaccaattctcctgccttagcctcccaggtagctaggattacaggtgtgtgctaccacgcctggctaatttttgtattttagtagagacggggttttaccttgttggccaatctggtctcaaacttcagacctcaggtcatcaggccgccttggcctcccgaaagtactgggattacagctgtaagccactgtgcccggcctagatatagtttattttcttatgacacaattcttattttatacctattgaaagagctctttagatggacagattttctcatatggtactcttgtgtatatgtatttgtatgtgaaaagatatatctatatatgaagaatgagaacatatgggcacagggaggggaacatcacacaccggggcctgtcgggggttggagggcaaggggagggataacattatgagaaatacctaacgtagatgacgggttgatgggtgcaggaaaccaccatggcacatgtatacctatgtaacaaacctgcacttgcttcacatgtatcccagaacttaaagtataatgataaaaaaaaataagtaaaatttaaagtgttttaaaatcttctttttgttcagattgtgactattctgaataccacttgaacttagagtcattgattgccatgtgttttcatacagtgttgccctttgaacatctagtgttggtgatgcagcattcctaaaataattcatcactattgtctgtgagatttccttctaagctgagttttgatgctgctgttattattttaaagagttagtttctgctgtacacaaccatacattgtttttaaaaactatgatttagttttagcattgaggcatgaattccaaatacatgtctacacactccctcctcccatacaaggtggtgtgacttacagatttttgggttatacaaaagggaaggaggaagaactgttatttcccaaaaagaatggtgtgcctagtaacatttttagtcagttcattcagaataatatcattccttagtcttctcagaagtcattaacctctttgccatttgttaggttattctcttggataatctgccagcataattttaaactcaataccaatcaggatcttttcatgtaaagtagttgtggcatctttaggcatcttaagcacttgttctgtctgcgtgattggtggcttaacctaggttctctggaaagcagagcctggggtaaggcactgaagtactgaaaccctcttggtgaggtacaatcccatggcttgccagagtgaggaaatgagatcgtgtctttttttttttttaagatggagaaaattataccatgtttgcaatacaaatggggttgatctagtatagatcaccacatattttctaattttcaaatacagtggattgtttttattatttttctcgaatcccctgtagcaattgatgttactgatcatccccttctcctaaaactctctcttccctttactctcaccacaccatattctcctgattctcttgtacctcttattattccttctcagtttttgtttgtttgtttgctggcttctctttattgaaacatatcttaaacattttagagttttctctttagttgtgttttgatttcatattcgcttccctgtagcatctcatgacatctgtggtgttacctaccttgctggatcccaaattcatactgacagcctcagtctgcctgttttacacccctgcctctataattacagtggctccataggtatgaagcctgatcattgtagaaagttcactcacaatagagaggggtggattggatgggacaaaactaggcgtgagcaggactggtactgaagtcattcaacagaagataaggccagagaaaggaggtgaatagagggatagagaggaacaaaaaagattaaagtgataattatgagttgggatggctgggactttgcaaccttttagatacagagaaagagtggaaagtatctaggttgagacccaggtttcagcatcaggtgacagaagtgtcataaagaaggggcacattttagtgagaaagggaacacattctgtcttggactctgagttggaagttattaccagttaccctctctcttctcagtttcatgcatcccactctcttaatacccctttcttttgggtttgttctactaatacctaaaacccaacaatcctttgaactcattgcttctaccacctcttaacttcctgattcagttttcatttccttcctacttagcttaaatactatagccattataattccttgacgtccctcgatttgtcctgcttgtttggataaacaaaaccctggtaaaattcaacttgttacttattccctgcttacaactgagctgctgaatgtaatggaggaaaacccgcaccgtgctgactgctctcactttaagttcatgatccctaacctcaagtgggcaccttgggccatccagtcatctgattatatttctttaatgttctcaaagtatggtctggaactactggcagtccctgaagtgcttttacgggtcctacaatttcaaaactctctttatggttttatttataatcgaataataatagattatttgccctcattctcattttctaatgtgtatatagaggaattttccaaaggctgtgtgatagtgcctataccgttgctgtggctgactgtagcatatatgcttgtgtacgtttcaaaggcttatcagtttagaattctagtatgttaaacattaatagctgtgaaaccccaaacaaaagctgctgaggattctcaatcacgttttaagagtggaaaggggtcctgaggaaaaaaaagtttgagaactgcccgagaccatttactttttgactctccagatcactctgtactaccttttcttctttccttaaacttaacttaatcacccgtttctcccttctttctctcaactcgtaatcttacttcctgttccactgagagaaaagacaaaattggaggagagcttcctcaggctcccaccttcctgcatctgtgctcatagatgatgccttctctcctgcactatgagtgagttaacagtgctcctggccaaggccagtttctccttcactcttaccccgatgctcttctgcatcatcagttctcacttggatctttcccatttgcatgcatgtatgccgttgttcccttcatttgatgtgagatatattttcagagtagagatagaaacatgtggatgaacattgggtgtgatggagagcgactaaggatgcctagggtttgatctgagctactagggcagatgatcagacaacctccttataactttagtggttcctgatggaccatgggataaaatccaacctccttagtatgcaagagctcatggtcttgtgctgcttcatctctcaaagctcttctccactttgtactcctgaccttcttgcagtttcttgaagactatgctgttaaatgtctctgtgctgttgcatatacctttttgtctgcttgaagttccctttttcatttgtctacttgtagattcagttcaagagtcatctttgtattgtcttccctgacttttctcccaggtgtggctgagcacatgctgctttgtgccacagtgtctggtagaatgcagcatttcttgctgttttgcagttttttttccttatccgtctcccttccaggctttggcttgattgaggatgccataggctagttcctttatatatggcactagaaatggacacagggagtcatacctaataggcatacataaataggcatagattaaattcatcaatgggatgaaaatggtgactctttactaccttttcaaacatctacaaattaaaaaaaaaacatagccagcactgactgtcattaaaaaccaaaaatacttaagtgccattactaataatagcaggtaacattacttcaccacttaccgagtgactctcagaaagtgactaaacctgtctatctgtctgttctttagcttcctcatctctaaaatagaccaaataaaagaacctacctcctagggttcttgtgagggctagctgaattaattaatgtgactggcttataacaagtgcccaatagatgttaactattttttactataatgattatcactgcttctgtggaaacatacaaggcagttactaaagctttccatgcattatctcatctaattgtccaacaccgtgaggcaggcactgttatttatccccatgtggtggatactctctgaagctaagaggggtttagtaacttacaccaacaagtggtttgtggtagagccaaacttagaataagaacattaagagcgaactgaattcttgtcagcgaggctatcggcctatctgaatgtgaactgcgatgaggactgcaatgaatttccccccctcccatggtattttcctgttgtgtggggctcccttggaggagtgttctgattggccttatggctgttgttaatagcacctccttactagtcagatattgagttaaaattttgcctcaggacaggagaatagcttgaacctgggaggtggaggttgcagtgatccaagatcatgccactgcactccagcctgggcaacagagcaagacttcatctcaaaaaaaaaaaaaaaaaaatttgcctcaggatactgaatctggatgatttcatacacatttatcacactattcagtataaaatgggtgttagacttttgacaggtatataatgggaaaaggaaaggaaatcaggaaaactaaggaaagttaatgaggggaagagagaaagtgagtgtagctgttcctttttagccttttaatactgtgccttgtgacagctggtctcaagcacatggtttaatgctctgttctggagtcaggagtgcctacatttctctgggaagcaggaacactgttgtttaaaatgatgtgctttgatagggcattttttttctattataaatattctttttgtaaattcacagacaacctattgttagctattatttggagcattattttatcatgtttttcatcctctgttaacatagacccttcatggtgttaaagccagtcacaagttgacattctggttttccttaatcttgggcatttagtggatagaaccatgaacagcaaagtagttccttttgatttccatgtaaaattatttttaaattgtattttgtgctgctgtctgaatgtgctttcaaaatctgtgttacaagaagtgtattcagtttttgagttgcttgcttaacaggaagccagcagcacatgctactcacatgagagttctttaaagggtcaattaatatggaatatttaatgatacacttgatactcaccttccatggttttcagagtgcctgtcttaaaatagatctgtaacagctggtctgaataaacaagcgtcgtgcttccctatgccttttcctgggagcatgggggcagcatggtttaatgggaacacttaaggtcaggagtcaggagacctgggttctagtcccagatctgtctctgacaggctgtgtggccttcatgtttccttctctttgcctctggcttctgtacttatagcaatagcagcggatacttacatgtgcaataatatactaaatagcaactaaaatgttttacacatatcaaggcagcattatggtttcatgatcagggatcaggcagaaatgattgaatcccagctctggcacttaacaacactgaccctgggaaagttactttacttattgaatctgttttctcatctgataggcaagaaattgtggaatttctttgcaggattatggtgagaatgaaaatatttaaatgcctggtacatggtgggtacttggtaagattatttccttccttctccccactgcctccccaatcctcatgtctatgagacaggaagaataagatcttatcactgctctacagaggaggaaatggatatgtgccctggctaaagggcttttctcaaggtcacacagacaggaagtggtgaagacaggacttgagtccaactgtcctaattccagattcggtgaagtttcccgttcctgctgccaaattcagtggatagatggcaaattgcatgaggaaatgactggaaaagtgctttcaaaaaacaaggcaggccctagaaatgtaaaatgagattgtattattttgaactgaaagttgttctatttaaaatgaaacatctaaaacaacgaaatttctgttattttttagtctgattagtttgtggattatttgctttttggtaattttatagcccctctactttctgtttgcttctgttttcatggaaatttgtgcaagtgaagcaattatttaaatcatcacattgtctgctcaatgttggactttgtagtagatgctgggtattcaaatgtgaatgaaactcaatccctgaccctgtgttgcttttagtctatacagtacgggttttacttcatattttcccttataaaacagtggatgggaagggagccgtttgggttagagtgaatgggcatggctaaagtttggtaggtgggtaatgcttttctggatacatagttaattttgctcatgtgtacattataccactaatgtcacaaaatggatttatttatgtgtgtgcatggctcaaggtatttctctcctgtctttctttttttaggttgaatttatgtgtgtatatatatatatatataaagttttgttataagttcggggcacatgtgcaggtttgttacataggtaaacgtgtgtcatgggggtttattgtgcagattatttcatcacccaggtattaagcctagtacccattagtgatttttcttgatcctttccctcttctcatcctgcactgtctgataggccccagtgtgtgtggttcccctccgtgtgcccatgtgatctcatcatttagccctcacttataagtgagaacatgtggcatttggttttctgttcctgcgttagtttgctaaggataatggcctccagcgctatccatgtctctgcaaaagacatgatctcattctgcatagtattccacagtgtatatgtaccacattttctgtatccagtctatcactgatggacatttaggttgattccatgcctttgctattgtgaatagtgctgtagtgaacatatgtgtacgtgtgtctttatactagaacagtttatattcctttgggtgtatatcctgcaatgggattgctgggtcaaatggtatttctgtctttaggtctttgaggcatcaccacactgtcttccacaaatgttgaactaatttacactcccaccaacagtgtataagtgtttctttttctccataatcttgtcagcatgtttttttttttgactttttgataatagccattctgactgatatgagatagtatctcattatggttttgatttgcatttctctgaagatcagtaatgttgagctttttttcatatgcttgttgactgcatgtatgtcttcttttgagaattgtctactcatgttttttgcccactttttaatggtgtttgtgtttttcttgtacatttgtttaagttccttatagatgctggatattaggcctttgtcagatgcatagtttgcaaaaattttcttccattctgtaggttgtctctttactctgttgagagtttcttttgctgtgcagaagctctttagttaattagatcccatttgtcaatttttgcttttgtatttctctctatagacatttgtacagggcacaaaggcatagagataaatcatatgaagttcccacttttagggggcgaagagaaaatggagttgatctgggagtcaggcttttgcaagaatgcagaaataaagttattggatgttataagactggtgcaaaagtacatgcagctgggtgagagagatgagaccaagaagaggacagagacatgaatggttactacagaggaagaaggtttgagaaataaaactgagtagagagagagttatgtgagatgaagaatgtgcaaagacattgagatctcagtgatgtctctaacaaaaatctattctgaacgatgatgtaggacccttaataacattagtactggaaatttggccataccatttgcatttgtcaggaaagacattgaagtacctatctttggtggataggctggagcatgagatgatggtctattctcttgaatatcttgaaagttcagggagcaaaaactatagaatcaaaatacttaatggacatctaaagtactgaaagtaaagaggcttgctctctctcctctctctaacctctagacttgctacttctccctccctcacatctactaagccattatcctccctgtgctctttagttgactgatatctcctcctttcctggtccatctggtcttgactgtgtactctcgagtcctgtcagaatttatgatcagcctttccatttttactccaattcccttcaccttctgtaacatgagatatgccagtcacctgactcctagagcaccctccttctcaggctttgctgcccttgcccgtgagcagcagagagctgttggagaaagtggcttaccaccttgcttttactgtctgtgttcactgcaacttgcccctgctttcattcacctctttgcagtgcctcataacaacaccctcttggctttctgtcattcccctggtcatgttccaacgctccaaatcccagacaccctgaatccctaactctcgcttagtaccagcaagctcaactagtcctcatcattaccacccagtcctcctgaaccctgacttgtcctcagtctgtcccattccacacactacaatggtgactattattattgttactagaagtaacagtagcaactgtgccaaactttacaagttacatttatatgcacatttttgccttctgattcccagagagagttttgggtcttgaagtagatgtttataaaattagaatctcagagagaaccaggtgctgtgagaactttgattctgagaagttggacactatacagtagaagtactttttttttgttttgtggtttccagaatccaggggtgtgcttggagagcgttatcgatgaaccagaagctctcaagtcacgtttttcagttcccagcagcacccaggctgtttgtcccctcttgcaaccagctcacagcatctgcttatttttgcaagcctgttttcagtaatgttatgattcagtagtacaactttcttttaatcatataggcaatacctgatagaaaaagttggtctagagtaattctgtcacttatcaatactccacaatgtaggtttagcagaaaactttcaaatatgagaaagcatttgttggctaaggaaagttagtaaacttagttcagtcagccacacaagaaatgcataagttgagattattatgacaaatagaactgtgtgtgtacatgtactttgggattctgtaaaatatagcaattaattcatcctcactaaggaggaagcaggaactgagagctctggagctcagaatgagtggtaacacaaaagatttgggtacttccagagacactgtttaagatgataatgttcaggcctataatcccagcattttgggaggctaaggtgggaggattgtttgggcccaggaattgaagaccagccttggcaacatagagcttatctctacaattatttttttaattagctgggcactgtagcacatgcctgtactcccagcaacttgggaggctgacgtggaaggatctcttgagcccgcagggtcaagtctgcagtgagccatgatcatgccactgcactccagcctggacagcaaagcaagaccctgtctcaaaacaaacaaacaaacaaaaataaacaaaaagaaaaaagattgttcataagtaattgttgaaaaataaatgaattatatgtaaaaaaaaccagaatgtgacataaaatgtttcttaaactacatataaatgcaacaagctaaacttcatttatgcaaatatttggagagtttctagattctgactttgagcctaagggcttttaattaatacactattctaataagcttgtgaggcagcatggtataatagaaattgtagtttccattccttttcattaagcctgtttaagtctaaggggatataggttgtaagttaaaatgggaatgaagcatagttgaaagttaaatttgcagtagtaaacactgtaaaacatggattcagtaattaaaaaaccatattaatcttggactagaatggtcctatttgaatgaaccattgtggcaattcagtttattgtttttgtttgtttgtttattttttttttgagatggagtctctcttgcccaggctggagtgcagtggcatgatctcagctcaccgcaacctccacttcctgggtttaagcaattcttctgcctcagcctcctcctgagtagctgggattacaggcacataccaccacgcctagctaattttgtatttttagtagagatgggatttcgccatgttggctaggctggtcttgaactgctgacctcaggtgatctgcccacctcggcctcccaaagtgttgagattacaggcatgagccactgcgcctggccagctttattgttgaaagagttatatacaattatagtgctgaaaaaattgttacagataattctagttcagcaacttggttttaaaaatgagcagtccaggtcctctgatatgtatacaatggtttgaccaaggtcacttggtttgccagaaccagtctaaatgcaggttttcattacagaacactaatgaccctcaagagaagtttaaatcatgtttattctcttacaatttttttttttacaatatcaggaagtacttcagaatttctcatgtgaagcacttactatgaagaccttattttctctcattcatgtatgtttttcattttttggatgcagtagtttaggggaatccgtaaaggtgagggtacagagtctcagactttggagcttagaatgttctgggagaattgaaaaagcattgaaaaatgattaatgaaaattataaaatcaaagatctgatgcttaaaggagtaaatccacagctatccaaaacttagccattcagcattactcagttcctaggagagcagttttgctattttaagccaggtaacaaaaatgtgtcccaaattcccaacggtatgagtattcatgtatgtttaggcgtcaccataagttattactcctaggttgtgagttccatgaaattagggaccatttgtttgtcagtttcctgttcttggctcagtacctggcacagggtgactgctcccatgaatggtcattgagtgattatttaatgaatccttcacattggccttaatgttggttagatgagaatgctagatattttttaatcctaggatgaaaaaattataatattctgccagtagttctgcagtgggaggcagcatgttatattgaaagaatatggactttagcattggccagacctcggttcaactcatgcaccattaggtgaatggctgtgggcaaattccttaatctctcagcatattaattttctttcttatggagtggggataattcctactgcagagtattgtgaagagtaagtgaactcagatgggcaagatacctagcacagcaccagagatgtagtggacagttggtaatcatgtgagattctttcccttctcctgtcccacaccatcctctgatcttctcatggtatagggctttcctcacagttcttttggaactcttagaactctataacttcgcttgtctatggcaaacttttcttctctgttgtagtcatctttgtgcagatgttttatttagattcattgaatataagacttggaatattgtggctttcaaaaatgatataattggcacatttgaatctgtcgatttgtctgttggcaatttcatatgtgtaacactctacccagaattgggagacctgcattccacatgactccattgctgataaactcagtgatctctaagtctccattttctctgtgatcaccagtgggtggcattttatagcaaaaaggttataggctctagagttcaaattttggatctgctgctaattagctggatgatctagggcaggctcttttccctctgggttcccttggcttcctctggaggacaccactgtctgtgctgtaggctgctgtcatgatttgataagataaagtatgacaaattcctgcctcagagctttgaatgttgtaaactcttaataaaagagtggcaaaacaccttccactaaatactattatggttggtgttattaatgtctatttcccttgggtagttgagggatccagtaatagaacataactattatagctgaagaattttagaagacactgagcaatttcttcaaggtcacataggaagtgataatggaatagcatgtagttgtgaaaatgaggaatagtccatcttattaatatgctccttatttgtggaatcagttatttggattattttcagtccttctcttttatggatagcatgactgtccatgtccttgtgcagattattttccccctttggattttttccttcagctttgttttccaatgcgaaatttctaggtcaatggtcataaacatttttgtagctcctgttaacatattgccagatagtgtgcagagaaacagttctagtggacaaaaagcacagatttccaaagtcttggttaaaaacaaagacttgagtggcatgtagattttattccaatctcagtcacttatttgtgaaatgactttgtacggattacttaacccctctcaatctattttctcatctgtaaaatgggataaaagtagctacctcatgatactggtcaagctattattgcagggtgtttatagtgctcagccttcattatcttgaatccatgtctgctcctctccactctccatctttcacttggaccactgcctcctaattagtctccctatgtgtattctacctcatgccaatccattatcccatctacattgtcagtaatcttgataaatagccaaaacattaatcttatcgagtgaacccctttgtaacccttagaatgcttccccatgcttggagtatggaccctgctgccctccccagcctcaactccctcctctcgctcattccataaacagccattcccagaatttatcacaccatttttttcttctggagttggaacttgccattttcttttgtttcttggtttccaaataccccttgtatacatcttatccttttaaatattatttttgtgactgtttttcttttctttctttctttttttttttttttgagtcggagttttgctcttgtcgctcaagctggagtgtaatggcgcgatctcgattcactgcaacctctgcctcccaggttcaagcgattctcccgcctcagcctcttgaatagctgggattacaggtgcccgccaccacgcctggccaatttttgtatttttagtagagatggggtttcaccatgttggccaggctggtctcgagcttgacctcagatagtccgctcgtctcaacctctcaaagtgctggaattacaggcatgagccaccgcgcctggacgtgactgatttttctactagatctaagcttcacgatggcaggggccacttatatttttattcactgttgattcctggggatcagcacaatgaccagcactagtgctcaataaatatggaggaatgtataaataactatataataactgttattagtagcagtaaacaagagggaaataattttagatatttgttaaatgcctttgtaagtttaaattgctctgaaattaaatatgtaggtgtttttcaagggcctctaaaaaattcaaatgtatcttgtaattaaataagatcttgtttttttcttatataatctttcatgttaatgagggaaagtctgaagagagggcaaataaacatagtttaatatctatcagcttttcatcttagccagcattcttcacccaagccctataataacattacctaaaccatccaggtggctgggcatagaatcatcttgagccaaatagcagaaggatttaatgatgaagctgaacattcttaaaagattagattatgcctggtacatttcctttcatccgagacctcctgccattttggtttgcatatcccaaaagtgcaagctatttcatattacactcttaacttccgcaggttcaaaactgcattttgtggctgggcacagtcgctcattcctgtaatcctagcactttgggaggccgaggcgggcggattgccagagctcaggagttcgagaccagcctgggcaacatggtgaaaccctgtctctactaaaatacaaaaaaattagctgggtgtggtagtggacgccaatagtcccagctactcgagaggctgaggcaggagatttgcttgaacctggaagagggaggttgcagtgagctgagattgtgccactgcactccagcctgggtgacagagtgagactctgtctcataacaaacaaacaaacaaaaaactgcgttttgttcattcagaaatagagttcattctttcattcattcagcatttatttcacccctacaatattcaaagccctcattaggcactgaacatataacaaagaattcaggttataagagaggtatattttggaggatacacactctccctgtatctcatgtttacctgtggaagaacttttgttagaatattagcatatacctgggtatgtatatgtaacttagtttcttctgggtcttctctttgagacttacttacctgcaaagatggcagtggttttacagtctattctcatttttatgacaagctaagcagagtaggtcatgtctccaagggagaggcttaccacatggggagagggtaagtagaagatgagagggggtccggcatccttaagccacagtttccaatatatgttaagttttgttaataaaaacacctacatttcgatctgttttctgtatctttgctccttgggtttttcactcagtaggaaagaggagtatttattattttgaccttgggagactgtgaagcttatggcagcctagcctacaggcaaatgactgtcaaaaccaggcacagctgtttgtgatgggtgtttaggccttagcaagtgcaggatgcactggtcctggcaagtggagccatgctgggctttgtgggtgggctttttgggttttgtgggcacagcttggactcgtgttgcaggtgaggcttaggaaggggtttgacatttttagtcatttggggtggaatagcatttgctgcttttactgtatttcagtcaaggctctaggccacgacttcaaactgtaaaagccacagagttttgttttgttttgttttgttttgagacggagtctcgctctgttgccaggctggagcacagtggcaccatctcggctcactgcaacctctgcctcccaggttcaagcgattctcctgcctcagcctctcgagtagctgggactacaggtgtgtgccaccatgcccagctaatttttgtacttttagtagagatggggtttcaccatgttggccagatggtctcgatctcttgacctcgtgatgtgtgtgcctgcctcggcctcccaaagtgctgggaagttttaagagtgctattgtgtgaggttctttctttaaattgtgagagacaagccaaggaaatgataaattggcttcaccacattcacttaattttgttctaggccaaatgaaggccctggagggactaatcttatgtaattttgtagtttatctacaaatcttaataggccacctgtgatatgaccaacctcaactgactaatcaagagcagaccaagaaagcatcctctgtatacgtatatcaaaacatcactctatatcccataaatatgtaaatttattacatatgaactaaaaataaaaaggaaaaaaagatggccagaagtgactggccaccaagactctaagagtaggagatctggtgtgccaaggaaaaaggaattgaatcagaactaagtcaaaaaggaacacatcctctctgcagagaagcaggtctcaaagacaagacctgtgagaagctgaactctacactgcctagggggaagaagcattgttctaataccccaacagaagttcctctacaagaaaacgtgagttttgtttgctctggatttcataattaagttctggccattaggtcatggaactgtagctgtaaaagatgttggattttgttatttagcagataaaaaggaatgggggtggcccttaagaaatatatggcatattcttgggttgagatagacaagcaagtcagtaatcttattgcaaaccagaaagttaagaagatgattacaaaggccgggggttggtatggattctagagatcaggttttcttagaatatcaaggagaaagtagaattggtttgaaaaataagttttgttatgatcagaaaagaagcagtagtagactgaaaagactaagctaggagaaatgttcacatttcatgagaggtatgaagggagaaatgagatcttaagtcaggatacacagatataaaaaggaaaagagatcactctaatgattaccaattagaaagtgtggtgggcctgaagaagtgagacaagatctgaaatttttttaccaggttcagaaaatgttgccaagtgtccctttaaagatgtagtgagagtctgaagtatgatttgtaaggccaagggctggatatggtcttgcattttgtacactgagtaaagatttctgctagtagaggttgaaatgcaactgctgtcttctcgctgtgggatctcaccagggtttacatctgtcctggaggggtactttcttctagtttgtataaaatattcatcatctcactaggctagtgttggtgaccctgggatagcaatatcaagtggttacagaaaagttgcatttgcaggggaaagcccagcgatgccagcataacatactgaagaattcactgagtttcaaggtgttaacattactgtgattgggcaggcaggtatcacttgcacgctgaaggaacattctcaaagttttttggagttcagactctaaggggaggcaggaaaagatgaggggtattctaggaggagacagtctagggctggctggatgtggcctgatgagagtcacctcctgactgggattatgtaacttgggaagtgaaggttgacaagatttatttaaataatgcattttttttggtaggggagatcatattcagaaccttaaaattctctgtcatctgggagattttatgataaaacattgaggaatatgttagaaaatcaaatatctggtgcaggaagttaaagagaaagtaagccatttatttctacccaacagtgatagctctaaagaggaagagacaggaagatgggaggagcctctgaagttttctcaaaagaaaatgggatcagtgtatgaaaatttaacatgagggatataccctacttctggcaaaacaaacaaaacagaagtactgaggacctggtcattaaaatgtacagaaactctaatcttttaagtgtccataaaaaggtgtagctcgtcacaggccccgaaggatgttggcctcggaaatggttctggaatcaaaagaagttctcgaatcttctagagttcacttggaaaaaatgagaggactaagagatgaccttcctcaggaagcagtttttacagcccaaagcaattacacagcaaaaagccgttgcaacagatgctgttgcccaagactaaaaatttctgcttgtaaaagattgtgaagatgatgactctactacgcagagaccacattcagtttagtcctttagtactagaaacatgggactcagaagaagtagaagataggaaatttagaatgtgcgggctgggaaagaaaggttctacaaatagggcctggagggactacggttgccaccactgcaaatttctgaactttgaaagaagtgagtgatgctccaaatgccaggctttgagggagaagacactttgcaaagtcagattttttcctgccagtatgcatggggccaaaattaacctcctgcttgaagatttcttctagttgagggtttttttttttcaattgtgctaaaatatacatagtataaaacttaccattttaaccatgttgaagtatattgttctgtggcattaagtacattcacactgttgtgcaatcatcaccaccatccatctccagaaccttttcatcttccccaactgaaactctatacattaaacaacaactccccctgaagcccctggcaaccccctttctactttgtctctctgaatttgactactctagatactgcatataaatggaatcatacagtttttggccctttgtgactagcttattttatttagtttaatgtcctgaaggtttatccatgttgtagcctgtgccagaatttctttcctttctaaggctaaataatattccgttgtacagacaccactttttgtttgctttttcattcattgatggatacttgtctcccaatcgagttttaagctttagaaaattggcatagtttcgcaggcatcctggcaaggctgaaaccaggaggactttgtttttatttgtagaaccttctctatctttcaaatgtcctggagtttctgctgttgtctttggaagcaattacatggctctgggttatgccaaattctggattctgggaacactggcttgcttgttgtggtagctacttcatggcctgaggattagctttccttttaaatattgtgggtgtggggcagatgatagtcttgcctgaccttataattctttggtctctttaaaagtggaggatgtcaaagatttgagataacgttgactcaacatctgaggctctgaaggaactatactttcttcattacagcttgaagctgtttcaaaacaaacaaaaacaacaaaaacctctacaattctacccaggcatcaagagctcctccagctggtaatatagaatacgaaatttgagaggatgaatttgacctttaatattgttggactttgtattggatatctttcctccatcacttcaaaatcgtcttgcttggcctcttattgcaaccacagctgcagtagacagttccatacaagcttccaagaacttcatgggtacatctggagagcacctcacctggggccacattctctacctgtcctgtcttactcttcctcctctgggcttctttctggtgcatgggggtggggggagatattaagtattccccaagagcaatggtcagtttagtaattcgtctttgtatttttcttccttccttccccatttttaatctgctcctcaggatcacttcaccaactaaatcctgcattcaggattttgtctaaacttctactttctgggaaactcaggctaagacagactatataaagatgctccatgacttagatggggttatgtcctgagaaacccataagttaaaagcattgtaagtcaagactgggtgttttgtagacatgatgggatggaaaaccaaaaaacactatatccaaaaaatgctggcatcacagttacattgtagagtattggttgtttaccctcatgatcacttggctgactgggaggttttgcttgctgccgctgtccagcatttcgagaaagtacggaactgcatattgttagcctggggatagatcaaaattctaagtacagtttctactgaatgtgtacctctttcacatcatcatgaagttgtaagttgaaccatagtaagcctaggaccatctgtgtaaaggcaagaaaatttgagtctagaatttaattcctttagaatttaacatttttggacttgcaaggagatttagtttctagtctttaatatcttaatggaaaactaaggtttatatttaaaattggcgctgttatcttagtgtttagaaaaaaaaactagacaaatttaacacagtttaatgaagccaagaacgatttgcaaattgggcagcccccagaaccagaataggtccacagcgattctggggctgccacatgggaggataacatttatggtcagaaaagggaaagtaacagaaaatggaagtgaggtacagaatcagctggattggatatagctcagcgtttgccttatttgaacacagtttgaacagctggccacctgagattggctgaaactctgtgattggctgaaactctgtgattggtacaagagtaggttatggtctatttacacatcccattaggttacagttcactgtgtccatatgtgcagataaatctttaggccaaaattcctttttcattgttcttttgttctgtaagtgctcattaaatgcccagtacattaggagcctttgaggtaatcaaagctacttgttgacatgagaatatttgagtacttcatgggtttagtgtcatgagataatatcacataaaccctttgggtttaccaaaacaggaaacatggagagaaaggacaaccaagtcatccactgggcacttctggattgttctgacatcctaattatgtccctaggctgcaagctcttccctccatgcctgcttcctcttccatttctgcccctttcttatctacagacctgtttctacagggaacagatatttcagtctttgggaatttatccctattccctagccccccaaaaaacccacccctgtggtcctgatagtttcctcccttgagaatctagatccctaagacactcctgcctctcgccttcttggtcccatctggcggctccttcctcctcagctttccttgagtttagggctggcccttgaccttagtgcctgaaggatagaaggtggggacatttctcgaagttggttagcctgttttctggctcggggatcgcctcctcttctgtagggtaattgtttcccattttcattcttacccttcccaccacctgtttatatatgaagggtcaagaatacctatagccctgagtccatcctccctggctccccaagaaggttaggcttgattccatgccaggcatgttgagaagactgcagacatgctctgtgtgacagagtgcattttatgatgcttcaaagcaaggaggcaaagataaaatgatttcatttttctattttcagcttttttgagttgagggttgctggcctatgaacttgatcacaagagccttatttatttggaaaaatgtattctaaattctaaggactagacatgttagtgtactacattctaaaatttttcttaaattggggcctacctatagtgtatagatattaatgcagtcattatattgtgttaataattgggactacaagccttaaccagagtcttagaattttatgaattttaatttataattttattttaagggtgccactagaaaccttgtgattaactttaagggctttttggctgtaatgactgtaattaggataattatgcatactttctttagcattgtgtcaacatgatagtgagggcataaacagccaagaagcagttataggtattccctgctcattttgcattcatcacacattcattgaatgttttgtacttatctcaaatagtagaggataccaatggtgtaagtttaagaattacatggttcttgtcctccagaaaccatggagtccagcaggaaggaaatgacatactggtatttggcaggcagagatggaagtttggtttgaagaaaaccttttgtgctgatgttacagctgctgcagtcactagccacattcattgtgcaaaggctggaggattccacagtcagcatggaagggaccaattagtcatgcgtgggtttcatccttgcctctataagaagtaacatctcaatagtcatggtggtgttttgaatttaaataatcacacattatttcttggtatgtttttcagatcgccaaatattgtggttttgtgtcacatgtgcattatttgttaaaacaggattatggtgtgaatgatggagctgtttttttggggtggcggtggagggtgttatgtttagactgtcactcttgctaggcatcctttgcctgactgtgtgtaaggtgtggcaatctcagtagtcacattggccctcccatttcccgtagtctttggaaatctgaccggcagcattgagaagtaagtaaaaggggtgccctctcagatgtcccttccttttaaggaatgatgtgtatcaaatcacaagatcggtcggggaaggagcagcgtgacacaggtgtatcttttctgtggtttgcgatgaggcataagtgcataaattccaaccaggaaaggaagtgcagggaattctactctcaggacatccttatggtcctgacaacttctttggcaatgtcagcagcccttggcattttgtcatgcattcttctccaacttgaaattcaggcttagtgcatgcagtatgccacagtcaggcttgtggctactccaggaggggagctgtgactcattcttgagtcacttggccagctttggtttcaattaagcaaatgaatgaaaacaattaaaaacagaagttgccgactaaggctaataaaagggcagcagtaatttttgtctactgtcactgttgtttctctagattgtcatatctttaaaaactcggtaagacaaatctgttagtgtttgattttagatttcttgtttataatctaaaaatcagacccagaatctgatttacctttttggttctaatctagttatattgtaattctaacactatgcacaactaatttatatattaaatatagaatttttcattggctaaatgcactttcctcaaatttgtaagaggttttccactattcaaaagtgttacatgttgcattaagtcattgttgattattcaaattattttcagatttattttccaagtactaaaaaaaattgtgggtgtattttcaggatgttttatctatcaattcatatttttgagcccctcctctcccttctcaattcacattttaaaaattattagttcatcaaatctaggaactgtaataatgtcctacgtttacttttctccccaaatcataaaatttcagtaaagtttccaaaaggggcataaatgtgtcctcatctctcacacactgaaaagcaaaattcttcaactgatggggtattttcacctctttgatgtctgtgtgcctctgtcatcggtgtagttcagagccttatctcccttccattagaccatcacctgatataccatggtttctttcatctccttgtcattgtaataggaacacctttccctttgctggttaactcctatttctctgcaaaatacagcataggtaatggccttggttggcctgtctgtttttggtgcctctcctgtgtgcctccctagcacttcccctttgtcatggtgcacaccactgcaccctattgtccctttgcctctgcctaccttgctgtgaacttattcaggtcacggatggtttcttactcatttctgtaactgcaatgagtaagtgagtgaatgaaatgttcatcctcattctgatggggaaacttatttctaattttagggactgaggaccaaatttgtgtatttgtcagacctggcttttcattttctccaaccactgaacatttcagtgctcgtaacactgtaggagagagtagaccctgtggtctctgtgcagtaggtgctgctgctcctttcttcctggagaattatatatttacttctttgatataccttatcactgtgaattttatttgctgactggcagtgtaaactctggctttctagaggtttatcttaggaagaactcaatatttattcacttgaatgaaatcaaataacatttggcttaattgctttaaaatgaaggaataattagaagcaactgctttgctttggagaactgtaggaaactgtaatcttacagctgtaattgcccccaaatggagaagaccttaggaatttatgttgaaagtagaacactgccaattgttctcattggcaaattggctgatatgaatgtttgccaaccggaaacttgccccatcagttcgcgtaatctgtgggaggtgaatatattttatgaagaaaagtgatagagggaaattagaggctattgttactagtgtgtgatgggttcatgtactaccaactcttctcctcaaagctgcagatagcctggtcgtgcaagaatttgtttcttgtagcacgtctcctctcatttgcctcgctgtgccgctatattttgtttagcatgtgcttttctcttaataacaacacagtgattcacaaaattccccagagtgtgtgttcagtctgaaattttctgaatgtgatatttgaaaatgctaaatacagcatataattaaaatttcagtggttaagttttcatcataacttatttttggaactaagagtttccttttcgagacttttgatgtgtaagaagggtacagtttttaacagagctacctgtgtttgttagaactatacttttttggttagaactatacttttcataggagccgttcctcctggagacacatctttgtctgaaatatttaggaattcttaagtaattgttgctaatactcatcttagttaaatggcttaaaaaacaattccacatatgaaggatgcacacacacatacacatagcctgttttgttctgtttctgttttcacaggaagaaaaagagtggcaaaatatatcttctgctctgttctaagggttttggtccagatcacaagtctcaggattcttagcagcagaagagtttatgattctaagtagaggtgcatctgtttcttgttgtaatattaatagatgacatccaggaaagtcttgggttttgcaatattttcatctagccatttcacagaatagagaatttatccttattctaaaggatataattatttaaagaataaaccatagagttcttataattccaagataataagaatagaaggcacttttgaaatttccttgaataaatcctaatttcttggattagaattaaacagctttttgagtatggtcactgataatgtcagaaactgttttgcattcaacaaagctggccagagaccagtggtagtgctttcatcttttggtctgatcactattgtgagccaagctcctgctaagggccaaagaagaaactgtaacttctgtactcctcttatgactgtggaaacattgctttacctacagatagcatgctttttaaaatcgcaattttcaagtaatgagatttaatttttttttttttttttttgagaagggtctcattttgttgccctggctggcatggagtggtgcaatcatggctcactgaagccttgaattcctgggctcaagccatcctcccacctcagcctcctgaggagctggaactactgggtgtgtgtcatcatactcagctaatttttaaatttttttgtagagatggggtctcagtgcattccccaggctggtctcttaactcctgggctcaagtaatcctactgccttggcctcccaaagtgctggggagattcaattttcatatgtcaattaaatttacagaatttgcaaatccaattgcaggaaatgggtagatgagctttaactttttttctccttctaattgctaaccttgaagtgagctaattaatgtagatggactctgaggacatttatattcagaatttgaaatggtcagattttcaagagcaatgagtctaagatatcctttgcttataaagggtagaggaggaccaaatagtttctggagaaaggttatcttttgtactggaaaaaaaaaaacacaaaaaaaccaccacaccaccaccaaccaaattaaacctaaacctctggcaaatatgagtattgtaagcaaaacaagacaataaaataaccacaaaactgaataatttagaaagaaaatatttacactgtactgtcatttaggcctcggaatagtaagaggtttttaatatattcacacacgtttcattatttggcataaatttcttatacataggcatatttattggggagatatattccttaacattgggatatgtattagtttcctattgctgctgtaacaaattatgacaaatttagtggctgataataacccaaattcagtattttaacagctctggaggccaaaggttcaaaatcagtttcactgggctaaagtcaagatgttggcagaactagtttttttaagaggcttcaaggaggaaattaattttcttgctttcttcaacttccagaggccacctggattctttgccctgtggccccttctttatccttcaaatcacatcactgtaatgtctgtttccatcacaacattgctttctcctgttctgtggtcaaatcttactctgcctcctttttataaagacagttgtgattatatttaggactcacccaggtaatccagtataacctccctatctcgagatctttaattatgtctgcaaaatcccttttaccataataaagtattattcattggttccagggtttgggatgaggacatctttggaggctattattcagcctaccagcatacttacaggtccttgcagcatagaccctatggagctgtgttctgtaaatcatactgcatagttattgctttgttcccatcaaatcacctgaagtctcacatgtttctgcatagtctctttcaggttttgttcatgcaaactaatgtcactcactcctgggcagaggacttctgccagtttctccatgactgctacataaatcactgaattatagtctcttcagctaccacttctaaggtgtcattcaccttgaactcctgagaagtatgtcttaatgcccgctcttgaacttgtgtggcatctctcgtgctgtgatttgggtaccttttgttagctgttgtgatgaattaacattattaccagcacataaagtaacatcagataaagtaaatgaaccaattgacatgccactgaagccggggaaaacacaagtgtgggcaccaggaatgcccagtgcagtgtgccaggctggctcttgttgcctgtatgggtgtgagagctatcgttgtgctatgctggttggccataagaaaaacatttattagctgtactgttaagaatgtaatagatttctatattttttcatatagaactgttctcagattagtttcataaggaccatgcttaatgttcaaagcacaaatttgaaataaaatggtgaggtattgaattactgagagttagtccctttgctaaacccccaaatctgtggtttggaattagggctgcttccatagtgtaatgctagttgttgttactctcagcatgagctgactgttaataatggctgtgtaattttgagcagaccacttaagttctctggtcttcattttctttatttgttaagtaaggaataatttgactacaattctttatgacaatatttcaatcacgtgttttaatatccatggataatctaaaatatgtaaagtataatctgtatcatttgaatagtctaaaactatttatgttggaaaattttaaacatacacaaagagaatatgaactgtcatgtacccatcacctggattcaacggttatctaggttatcacatttgcttcaactatacccctttattctttaaaaatgtatattttttatttttaattggcatataataattgtgcatacttatagggtacaatgtgatattttgatacatgtattcaatgtataattattattctgcctaagtattaaagcaaatcccaggcatcatgctgtttttgtccttacacgctttgatatgcatctttaaatttttaaagattttcctaaatagtcagaatgccattatcacatctaacaaagtgagcaatttcttattataatctaacatacagtccgtattcagatttcttagattgtctcaaaatgtttcctctacacttggctccaaagaaggatccaaacaaagcccatttggatccttactgcatttgaatattacctgtgagtcacttttaatttagtggtccttttctctaggtagtaacgagatcaggaaacctggtcacttgtctcgtagactatttcacattctgtatttgttgtcttgctttctcatggtgtcattaacttgttcctctatatattataataccttaaaattgaatattagctctgaaggcatgaacagattaatattcacctatttttgctaagatacatcatagccgatgcagtgtacttcattttgttccacatcagaggtaaataatggctggttgccccacacgtagatttgctaagattgatcggtgggtttaggtggtgacagtatcatctcttcaatataaagtttttcattgacttttcatcaatcatgtcatttattattaatctttgcctaaaacaattttttaggacttgcaaaatggtggttaaaaaaatgtcattagttctttaacattttttgactggaattcttttgtaaagaagaatcttttcttatcgactaggtaaccctgaaagtgtaatacatatgggaagggcagaagtagttaggtaattattttcctttgattaccaattttcagagtatgtcatttctagtaatgactaattgatttctttttggaggggaggggcagactttctattgttttaagtctcattctgagctagtgggtctttatatatattcaatgtgttttttatcaaggtactcataattctttaaaaaaattttttagttttaatttttgtgggtacataggtatacatatttatggattacatgagatattttgatataggcatgcaatgtgtaataatcacatcagagtacatggggtatccatcatgtcaagcatttaagctttgtgttacaaacaatccagttatactcttttagttattaaatgtacaattattttttactacagtcaccctgttgtgcttgcaaatagtatatcttactctatttttttttgtacccattaaccatccctacttcccctccaaccacccactactcttcccagaatctggtaactatccttctattctctatctccatgagttcaattattttaattttttagctcccacaaataagtgagaccatgcaaagtttgtctctctgtgcctggctcatttcacttaacataatgacctccagttctgtccatgttgttgcagatgacaggatctcattttcctttatggctgagtagtactctgttgtgtataagtaccacattttctttatccattcatctattgatgggcacgtaggttgcttccaaatctactttaagctgataacaaaactgtttgcacaagcaaacaaacaagcaaaaagaaaactaataaatttctacactttttaacttcgtccctccactttttaactctttattatttctgtttatatcttattgtactgtctgtctggaaaagttgtagttattatttctgattagttcatcatttagtctttctacttaggggagtttacttactatagttacaatgttatataatattctgtatttttctgcgtacttactattaccagtgagttttgtaccttcagatgatttcttatttctcatttatgtccttttctttctgattgaagcttttaacatttcttgtaggacaggtctggtgttgatgaaattccttagcttttgtttgtatgagaaagtctttatttctccttcatgtttgaaggatattttcactgaatatactgttctagggcataattttttttttttttttttttgagacagagtgtcactctgtcacccaggctggagtgcagtggtgtgatctcggctcactgcaagctctgcctcctgggttcacgccattctcctgcctcagcctcccaaatagctgggactacaggcgtctgccaccactcctggctaatgggcataaatttttctccttcagcactttaaatatgtcatgtcactccctcatggcctgtaaaatttccactgaaaagtctactgccggttgtactggaattccattatgtgttatttgtttcttttttctttctactttttggatcctttctttatctttgatttttgggagtttgattttcaaataccttgaggtagtcttctttgggttaaatctgcttagtgttttagaaccttattatacttggatatcgatatctttctctacattgggaagttctgttttattatccctttgaataaactttcttccttatctctttctctacctactctttaaggccaataactcttaggtttccctttcgagctgttttctacatcctctaggcatgcttcattgttgtttattcttttttttcttttgcctcctctgactgtgtattttcagctagcctgctgtcaagctcactaattctgcttaaacaattctgataaagactgttgcattcttcagtgtgtcattgcatttttaaacttcataatttcgacttaacctttgaaaattatttcaatccctttgttaaatttatctgatagaattctgaattccttctttgtgttatcttgaatttctttgaatttcctcaaaacagctattttaaattctctgtctgaaaggtcacatatctctgtttctccaggattggtccttggtgcctaatttagttcattaggtgaggtcatgttttcctggatggtcttggtgcttgtggatgtttgtctgtggctgggtattgaagagttaggtattgtagccttcacagtatgggcttgtttgtacctatctttcttccaaaggctttccagttccaaaaggacttgggtgttgtgatctaggctgtatctgcattaggaggcaccccaaacccagtaatgctgtggttcttgtagagttgtagaggcaccgccttgatggtctttgataagatctggaagcattctctggaccaccaggctgaggcttttgttctcttcccttactttatcccaaatagagtttctctttctgttctgagccacctggagctgggggtggagtgacacaagcacccctctggctaccaccaccgggactgtgctctgaagccagtatagcactgggtctcacttaagacccactgtaaccactccctggctactgctgtgttctttcaaggccctggtgtcctaccatcagcaggtggtgaagccaggcttgtatccttcccttcagggcagcaagttcccccaggccccaggtgggtccagaggtatcatctgggagccagggactggagtccaaaatcttagaagtctacctgtgttctattgtactgtggctgagctggcatacaaaccacaagacacagttcttcctactcttccctcccctttccacaggcagaggagccttaccccatggccagcatcacaggcccacagggagtactacgggactaccaccaatgttttcttaagggccaagggctcttcagacagcttgtcattaatgctacctgacctgggactccccttacagggcagtgggctctctgttgctgggcaggtccagagctaagcctgtaattggagaccccccagagcccacttggtactatatccccctgtggctgagctggtacctaaggtacaatacaaagtcccctttgctatttcctcttcttttttcaaacagaaggcatctctctccatagccaccacagctgggaatgtcgtgagtctcaccagaagctagcaagtctcagagtctgatctgaggcccatggtgtactacctgggtattgataatggttattcagggaccaagggcactttagtcagaaggtgattggtcctgccagaactgagtccatcgcttcatggcagtgggttcccttgtggcccagggtgtgtctagaaatgttgtccaggagctagggcctggaaagggctcatgactgtgatgtcctatcctgctgtggctgagctggtatccaagatgcaagacaaggtcgtctttactcttccatcttctctgctgaagcaaagggaaggattctcttttggagctgtgagctgtgcagcatggggttaggggaggggtgtggtacaagcactcccttagttgcccagctggtgtttcagtaggttgtgttcccccacagtcccctggctctgagcccagttcaacactaggaatcacctaggagttgcaatccctgtggtctagactgcctttcaagtttatgttgggccctagagcactttagcctgtggtggtgaggcttgtgggacctcaagttctgactgctgagatggaaaattcccctctggccagggctggtttaaatactcccttcatgggcggacttcagctgagttcagcctggtttggatttctgctgtgatggggcaacactgagttaaatgcaatgcctcgcgcttgctgcactctttctctaccatgtgcacagattctctctctctaccacacagctactaccaggagatgggggaggggtggcatccatgattcaagactgtctttcctatcctcttcagtgctgctttcagtgatgaagttaaaaccaggtactgtgagtgctcacttgatttttggttcttatgaaggtgattttttgtgtagttagttgttaaattggtgtctttgaaggagacaattggtgtagccttctattccaccatcttgctctaccccctacccattattctttttgaagttcaacttgtcctatgtttggccaatgggagccccttgttgattctttttgttttgttttgtttttgtttttgagacccaagtctcgttctgccacccagactggagtgcagtggcacgatcttggctcactgcaacctccactcccgggttcaagtcattctcctacctcagcctcgcgagtagctggtattacacgcacctgccaccatgcctggctaatttttgtatttttttagtagagatggggcttcaccatgttggccaggctggtcttaaactcctgacctcaggtgatctgcccgcctcggcttcccaaagtgctgagattacaggcagccaccgcacctggccccttgttgattcttgtaacaattttttacattagtttttaaaagatgcaagagatacatctctgtttatatatacgtatgttatatatgtaacatatatatcatatatgttatatatttatatgtgacatatctgtttatatatacatatatggtatatatgtaacattttttctttgatttatttttaattacatagttcaatagcattaagtatgtgtccacattgttgtgcaatcatcaccacaattcatctccagagctcatcttcccaaatgtaaactgtgattctgtaacattaaacagtaatttcctattcccccttcccctagccattgacagccaccattctactttttgtacctatgcatttgactacactagatacctcatgtaagtagaatcatacatttgtgcacttgtgactagcttatttcacttagcataatgccttttaggtttatccatgttgtagcatatggcagaatttccttcctgaaatttaaggttgaataatagtccattgtatgtatacaccatattttgttcttccatttatatattgatgaatacttgagtttctttaatcttttggccatcgtgagtaatgctgctctgaatacgggtatacaaattcaacttttaaattaaagtgtaatattggtttgtaccttctttaaataattatacagcttactgaatattcacaaactgactctcctatgtagttagcataggatattaccagcaccctagaatctcactttggtccctccctcaggcctcaaaggtacttctatcttgaccgtcaacgctaagattagtttttctgatttcttttttttaagtgtacgtaaatagaatcacacataatgcactcttttgtgtctggcatcttgtgttcaatatcatgttttgagacatatccacattgtcccatgcagcaatattttgttcatcttataaatgtaccatattttatccatttttctgcttccaagttttagtattacaaatatactgccttgaccatcctgtacatatcttttgctgaatgcgtacatatcttttgggacacatttctgttgtgtatagaactaagagtggcttttaactgtgtcgctctagctgtattacacagcatttgccagagtttccctaaatattcttaatatcgttgtgttgttctatgtttaatatttaatatgccaagggttctcagggaacatatggtcacagttttttttcccccaatggtgtctgtaaagaaacaggataaacatttcaccatagcatcaactttccaaatagatatgaaggcactgtttttagctactgtcagttaaatcagtttggtcatgtatgcaatgcatttacagtttcttaaattttcttagtgtgtattgtatttgcatgatcagaaattctaaagccatagatatttttggtggtggtatgctgagaagttgacaaaagttgagaggtaaccaggaggtaatatttcctttttgctgatgtggccacttctatgtcattaaagccctgtcagccacccagaaaaccagctatttcttttaaattgagtgtttacagggttttttttttttttgtcataatatcgactggagggtaaaatttgttatcaagctgacatcatttagtaacattcaaaattctttatgtggaaacaatttataacaattgatttgtaatttaggcatggacatttagttttaaaatagcgatgacatagatttacttatttttaattctttgccttcaaaactgcaatgggttgttgacaaatttctgtcacttctcaccaataagattctatagggaacgggagagaagaaagaggttgtatccatggccatgtcccttctccagaatatggaattacatgttctaaaaactgttctaaaagctccagagtgaaaagtccaaaacagtactgttttggttgatttgggctgctataacaaaatactgtaggctggggagcttataaacaacaggaatttatacagttcttgaggctgggaaatccaggatgaaaataccagcagatgtggtgtctggtaagggcctgtttcctgatttatagatggcaccttctcattgtgtccttacaagatggaagggcaaatgagtccccttgggccttgatatggttaggctttgtgtccccaccgaaatctcatcttgaattgtaatcctcagatgttgagggagagacctggtgggaagtgattggaacatggggcagtttcacccatgctcttctcatgatagtaagtgagttatcatgagatctgatggctttataagcatctagcatttcccctgcttgcacttatttttcctgacaccatgtaaagaaggtttttgctttcccttcaccttcctccatgattgtaagtttcctgaggcctcctcagccatgcagaactgtgagtcaattaaacttcttttctttataaattaaccagtcttaagtatttttttttaatagcagtgtgagaacggactaatacaggcctattttataaggtcactaatttcattcatgaaggctctgttcgtatgacctaatcacctcctaagaggcctcatttcctaataccatcaccttcagggttaggatttcaacttatgaatttagggtgggaggaagacacaaaccttcaaaccatagcaaattctgtgggtaggaagatcaggcctgatgcagtgggactcattattagttgggggttaagcaattccaaaacaaaacccaaacgcacagaaatataccatatgagtccatttatatacagttttagaaaaggcaatttaacttataatgacacagagcagattggtagatgctagagacaggaagggatggaagacagacatgaaaaaagagcataaaaaaactctgcaagctgttgagggtgatggaaatgttcactcccttgattgtggtggtggtttcatagatgtatacacctgagataactcatcaaattgtgctcttttttttttttttcttttttttttttgagacggagtctcgctctgtcgcccaggctggagtgcagtggcgcgatctcggctcactgcaagctccgcctcccgggttcacgccattctcccgcctcagcctcccgagtagctgggactacaggcgcccgccaccacgcccggctaattttttgtatttttagtagaggcggggtttcactgtgttagccaggatggtctcgatctcctgacctcatgatccgcccgcctctgcctcccaaagtgctgggattacaggcgtgagccaccgcgcccggccaaattgtgctctttaatatgtgcaatttattgtacatgagtcacacctctgttaataaacagcaatgatgtaaaatgtttcctcttaatgttcttaaaaattaagttgatgatggttaggaaattactattttttaggccatgttgcaagaacaaaaagctcagctagtatactttatacaatataacttgtatagatatatattcatataaaactttaaaaagtgaaagtcacaatataaatctcacagtgtactcaggatattgctatttctgttagataatagactttcagtttttaactttggtaaaatatgcctaaaaatcccttctactgcctggataaactcagtgattttttttttctggatactgacacaaaacaagacattaatttcctccttatggaggtttttttggcagtcagttatataaatatatattatgatacagcttgatgtggacagcacttgaggtgtgtgcaaggtagagtgatagatgagcccagtggaggcaactgtcaaccctctggctggagtgaggtgatgtgatatatgagggactggttgttttcctgaatacagttttgacagatcaaggagatacataatctaattcatgcatttcacaagcactgaatcttcctcagaagaacttagtgtctattccttgggtcatgtttgtgaggcaggttgaaggcctggtttacacaaaaaagctgagaagacattaaataactaggttaaggttatcctccatgaactagtgtaatagcaaggaatagcactaacattttaatttctcatacttttaataccttttttcctggtttttacagattaagaaaatcaaaacgatatatttaatgccttcttatttgcaaattttcttagaatgttacagtagataatttcactttagaactaaagattgggaggatttttaaataataaaataatttcagatgttaagaatgtttaccaccataatttccatttaaaacattttcctctggatgctttgttgaaattaggaaatgcatctctaagggatggctggttatggagtgatgacttggctgtcaggcaggtttcatgtttgagtagaataaactttcctaccactttccagaactttactgtgtccaggccgtatgtgtagttctgggatttagctttttaggcaaacattcttacaggtggtttctagctttttatcaccaggaaccttcttacaatttagagggggaaaaatagccatgtttacctttccccagttccttaccctctgcaatatgagaagtgctgtagggaaggcataagtgaagtattatgcagtgtgtttcactaaagtatgtgatgcagtttaaagactggagtagagtgttgatacctggcaattagcctggtggatcaggtcgagagtgaaggcccagaggaaggatacatagatccttaaggccaggctttcggatatctgcagcaagcgatgagagagcggatgggattgcagtagccgtgtatgacacgcagatgaacttgcaggaagccactgaaggattttaagtaggaaaataatataattggaattttgttttggaataatcttgcaaggagcagagtgaaggtgaattgcagtagagagggaaaccagttaaaaagctttatgatagtatctgtacaaaatacaatattaattaaaatactaataagttttattttatgctatttgcttattttgtatataacacatgtgagatgtgaagagaataaagtataaataaggcttttgtctgttctcagctagcttaaaagctacaaaggagatatatatatgcctcatttatacacacacacaaataatcgtaagggaaaatgtgctgatcactgtaagaggtacaaacaaggttctaggaaattcagtagggggaggatcccctgtcactggaggagaaggaaatgtttgtattttctttgagctcactttaattttttaaaaaagtatttaagaaattacataaaacaattttgcaataaaatataaggaataggtggggagctttttcatcaaagaagtggtttggagagttcaaactagttgggtagaatttcctgatttggaaacagattatccagagatatacacatttgtgagatatcatcatttcatattgttttagatgagcaaaatgccctgtctctccctccaaggcaatatttggtggaccacccgtaagtttttgtttggtttggtttggttttagcctcatcatttaggggagaagaattttgtccctatttgccccgaagtttcattagtggatggccgtatttataccctgtgtgtggtaatgatgaactcctatgcattttatctagcttttcaactattaagtgaagcttggtttaagcaaatctttagatggtagcattgtgccagtactgttcccgttttatcacatgctatacgttagtctagttcagcagagcattatgctacattcccttctcagtgagttatagatcttgaagttttcacacactatgttctggaaagaaagtataactgtttcctgtgtggttgaaatgcaaactaaagatatttcaactgcttctgtaataaggagataaggtcagacattatgaaagaaaagattaccaccgatttttttccccttttattcaagtgatttcaaggaattattttgtaagaaagtcacctcaactgatgaaaaccagtgttaattttctctttcattttttttaagttacctttattaaggtaatgttttttatgtttctgagttctgtttctgggacattgattcttttctttaattaattttctttctgttcttattaagataccacatggtttatggtgatttcataagatagtttaactgttaagaaattgtttttacatatttatggaaatattctataggtctttatataacatgttagtatttatatgtttacctgtataactgtaataaaatataatgcttacaatggtttataatacttagaggaaattatgcataatatatatattcccctctctatcctcctaccggtccctccatccaaagttcaggtgtgtcagcttgggcaagccatttaacttctcctggccttactttctcatatttaaaacaatagtcttgtagaagataaattcttagactttttgtacttgtctgatttatccagggttttagacaactttccagtttatattaagaataggctaaaacgtaaaccatcagaacttatcagccacatggaaatttcattaaaataggctcactggagccatgtaatagaattagtccagattcaatacatttatattactttcctctaaatgtaatcacatgcttaaattgatgagcagtagtataatagttccatagtgaatttgattcaagcaatagttatattaaatttctccacaaaaatttataaccattcaataaagctttaatatattgtcatctaaaggtaaatgtaagttttgtttttagaataactattgagtatatttcaagtcattgatttgttttttaattataaatttataaccaatgactaatttattaattttatgaatggtaaataaaacatacattggagaataacttgagtggtaaaatatgccttggtccagcggggtggctcgtgcctgtaatcccaacactttgggaggctgaggcgggcggatcacctgaggtcaggagttcaagaccagcctgggcaacatggtgaaaccctgtctctactaaaaatacaaaaaattagctgggcatggtggtggatgtctgtaatcccagctacttgggaggctgaggcaagagaattgcttgaactcgggaggcagaggttgcggtgagctgagatcgcaccattgcactccagcctgggcaacaagagcaaaactccatctctcaaaaaaaaaaaaaaatatatatatatatatatatgccttaaaaatatatatatatatgccttaaaactactttttactttatggttcattttcatggagtggtttattttttccatcaaaatacccaattaatttggatacagtgagcaaatgcttctgaaatagaatgtgtcaaaatattcttggtttctttggcctctttcatcatttacccacagcccctccccattcccctaccttcattgacctcggcttggtttgcaacaatccaggtttacatttttgaaacattaaatactctgagagagttaaagacttgtctgtgttgtgttcagatttgtagggacctcctgagctccacagtcccatttaccaggtctgctgttggtaaaataattgccacctgcactctggtttttagttccattgctttgttgaaatcatgatatttgggtttttcatctcattctgtaatattttcatttccagcatgtccctttcttactgtgctatctttcccaaccctgcctgtgtgtgttcctgttccccaaaggtgcttttcacactgtatgttcggacctggacatacatgaatacccttccttttggccagtctgaaagctattggagagcagaaactttgttttatttccttctgaagttagctttgtggttcccataggaaaggtattcacagaatatttgtcgattaaataattaactgttattctattctattactaccctttttcagttaattcctgggtctgtgcatctcagtccttaattcatacaggttgagcattcctcatctgaaaatactccaaaatctgaaacttcttgagtaccaatatgtggctcaaaggaaatgctcatcaaagtattctggatttcagatttttggattagggaagcccatgcagtatgtaatttgaaagtattccaaaattgaaaaaaaaaattcaaaatttgaaacatttctggcctaagcatttcagatcagggatactcagcctatattccaactttgatcttaggctttttcatttttgactgtctgctgggcaattctccttgactgttcttctgtaacttcaaacatagcatgtttgagactcaatgtctttcttgtgttctgtttttaccagtggtatcatcattcttttagtcaatcaggtttgaaaatgtctagtatttttttaaaagttgtggtgcccctttatgatccaggagtatggtgggtcagatctgtaagctgagtcagatagaccaatggctagaattctggcagttacctaacttgttgaatcttagttcccttatctataaaattcctacttcttggacttgttttgaggattgtgtcagaatgtccatgaaagtgcttagcgtggtccctggtatgtggtgaatgctgagtgagctgtctgtaatttccagtgtgtcatgaggggcttctgtgatgcttttcagctgcctcactactttggtgaggccgctgctgatgcttgagtacaggttctcatctcttgcgtgggttcttgcagcagtggcctctgctctggcccatgcaggactctaccagtagattttgattatttccttctcttcagaaaccatgatgactttctgcacccagcttgatcaggcctgtgcacacctcagtttgatatttaaatttttggacaatctgatcgtcaccaacatttctagccttagtttggtctcctctgcccgaatttccagtcactgccttcacactttacatcccctcaacttgtcttgtgcgtcacacagttttctcccctctcctttgtgtctagttttccctaaccatcatttgtggcccctgattcttgctgtccatgatgtttctcctgaatccttcttgtgacattgttcttcctacttaatccatgaatcgtattaattcattcattcactcactgccttgtaaggtagtgattctagacacttgttctagttataggtacttgaatacactggtgatcaaaaaagagacactccaaccatcccagaacttatgttatttatcagtatttattttacagggaatcatgtgttgtgacatctttgtataatttgcatttatttattgaactcctgtaaaattttttccctgtacaaattgtaaattacttgataggtattttaaagcttttaatatttcctttaatgtcttatttgatattttacacagagaaggaactcaaatattagttaactttagagggtcacattcagggcttgaggtttgaaactacaccttcaaaataaaatattacttgcaatatatttgaaaccagatttgtacgttatgcttcaggtatatgtttctttttaagaaaggtctgtaacagcatagattgattgtagtaattcatatttttctgataaaaatttgaccatgagtgaacagtatgcttctattcttaccagtggtaggtagaacacatttgatgtcacttgaacttaccaggaagtttttttcttcttttcatatatatatttttttgtgtgcaacactccccttcccttttaatgtgatgtctggatcaatgtttgaaaaaattctatatttagagcaacaggcagttaagtattaatagtttttgttactgtggacaataatagaagtaattgatgattgtcacttgcatggcttgaaggccttctctgaacttctacgctgagttaaatgctcccctcattgctctcaacatgcacatcccctgtgcttccttttttttttgtgatgctttccagtgttgttattatttgtatagtgtctaattttcctactagaccacatgcttcatgagggcaggagctctttctgttttcttcacaactcaattgcccggacctagtaagtccacagcacatataatgagtgctcactaaagatgcattgcagtaaatttgacattcattcactaatcaaagacttactggattcctgtagatgtcagggactgagctaggctctgggtttgcactggagaataaaacacagcccctgtccacagggtgctcatcaactagcaaaatgtgctaaatttgccttatttaactgacatttatatatggcttaaagtttctagattttttttaagcctcaaaataactctgtgaagaggtattgtttccctctatagatgaggacatcgaggaacagatcaagtaacttactcagtttcacataggattgggacctgcctctgtctggtctccaaatccttcacctgagacctgtgctacttccagccagtaaatcacatgggggtgatagtcataacttgcacctggtttatcagaaattaaatttgtttctcttggctcatgtgtttttgggtttgcattaaaagctggggcaaggaattatgatgtggaaatgagcccactactgattgaggcttttgcatctcattaaacctttaatagtcttattttctttgagactcttttcccattaccacaatttttcatggtgataattttgtttgactttggaaactgactagtctacattttgggcctattggattaagtttaaaaatcttttcttggtatttgggttctccatagtctgaaaaacttctgctccttttaacccctcactattcaagtgagtccctagttgggcctacagatacattcctacctttatacctgtctttaggctgtctctctctctaatgccttccacaaacttttggccaattaaaataaaaaatgagttcttccctttagttttcaaagtaagttccacctgcagggtttgcccttcagtcctgtgctagcctccaggccttgctgctgctttatgtgtgctggttttgttccctagtgagacttttaatttctggagcaaaaggaccaaatcttgtttttcttttctgtctcccacagtatttagtacagtgctggctataggaccatgcctactaagtaagcactaaaatgagcccattactgattgaggcttgaagtaaatttaattatagagtttgtacttcctaattataactgaaaacctcagtgttttccaaacattatggcacactggagaaaggcagatggaggaggcacagtcttttataagaacagagatacttcccgtttgtatttgtgcaagacaggttacggattgctttcatgggcattagctcacttaatcctcaagctaattttatgggagagaaattgtttaatcctcactggggagtgatggcattaggactcaaataattcacctataaatcacatggctgaagctaggacttggtgccaactcgtgtgactctagtgccctgccacaggagagacaggagcaaccaggctgcgagctccagaaggcagggcccagtaatgtttattgcacgtcactgttgcgagataaaactgaggttcttgcgtcagctgccctttgaattttctcatgggtacatttctgtctggctctgctggcacagttgagtttgtcccctctattgctgggatttctgtactcattagccatttacattcatctgtctgtcatctatctgcctatcatctctgtatgtttgtatataaacaataagacatttgcagttatataaaaaccaaccatctgaagtcttaaaaataatttgtgcactttgggaggccaaggcgggcagatcacctgaggtcaggagtttgagacctgcctggccaacatggtgaaaccccgtctctactaaaaatacaaaaattagctgggcgtggtggcaggtgcctgtaatcccagctacttgggaggctgaggcggaagaatcgcttgaacctgaaggcgatggttgcagtgagctgagatcatgccacttcactccagcctgggcaacagagtgagactccacctcaaaataataataattaaaaaaaataataatttgtgaagttgtaaattaaaatttttgttagtgcctccttaatactccactctgccaaggttgatgattcctgtgtataggttggtgcataactgtattgacagcattgggctggagaatgcaaatattatgattttgagaaagagagattattttgtgtacttatgtatttcatgattgtttcaaagccctgatcatctttggaatttgtccttggaaatttgtgaatacttttaaggtcaatgcatttccttccttttgcctcatgaattgagttcttgctatgggaaaggaacatatttttccagttatctgattataatttagagcatttaaagtttttattgctgttgctgtgagcgattagcagtgtactttcaattttgtactcttggttgtgtatacactctgggcacaatggcatgccagaggatcatcaaactggatagttcacacttaaattgactacatcttccaaatgggcattttatgtctgtggccttctgacatttctctggcaaacattagcttgtggaattcatcttaaacatttcctttgctttttgtctgtataatctgatgccagaaccatttaaaatatgattaaaaatttaaaacattaaatatagatatggattgctgtcgacagtatggactctataaagaaaagacagtcttatatttgtgctcttgataggataaaatctatatagtttttaaaaaacctacatgaaaaagattacaatagcttagtttagaggtagtataaacatgagattgccatcttcatattagacctggagagaaataaacgagaaataggcatgttgacttccttgatcctaaggatatgaccactgtaccaagtggttttgatgctgtggaaagtgtggttgtggaaaaagtgtctgagatttttctttcagttcaaccagagatgagtagttgagacttctttttcataaaggaatctgctagagagatgtggttcctaagggtcaaccaagtttgcagttgcctagtagtgcacctgctgttccagaagaggtgcagatgcaggtatctagtccctgacctggaggagctagttaatattttggtaagaaaaaacttaagaaaattagatctaacttacatggtgcttaatatttgtgaagtgagagatcagagaagggagagagtagtgtaggtggagaagccagaatgataggttgggaaatcggatctcaggcttttctctctaccatttgtcccagcaggccagagtcctggggtcctgtccactctcaacacatgcctttaatactcttacaattttattttctaagacctttttaaaaatcagaggataagcctttaagttgctggtatagggttgttagggaaaaaatcagtgatgcaaatattaaatattaatcactatctgcccttggtggtgttttcttatgcatttttaaaacctgagcttattggaggtttcttcctcaaaattacaaagcaacaaagcattagttttgtttagtattttttaactgatagattctcttttgaaaacattagtctgcctttgaagttgttatttttttgtgtcagaaagagatttttgtcaaatgtctgctttttagaaaatgatagtcataggtgtgttttctgtatgtgctacaaatttcacaaagctttcattcttcataggaaactaacgtaaacacgcacacacacacacaaacaaacaaacaaaaaacacttggtatttactttcttttaaacttccaagtcatgtagtccctgcctggctgttctgtgtcattactacatcatggcacttgacacctttatctatattcactacatttttgtttaaatcagcgctgtttgcagtaagtctattgtgtttgcctctagataatgtaattgatggacagaggaatctaaaggacctgtccaattgtctgtgctaaatttgtgggtcagagtgtttaaacacaggctgatacgaactctcatttttacattccccttgatgttatatcccagttgagaacctgtttctttctcacttggccagtttgctaacagttaattctcccctggcagataatagtgctacttttcttgctctagcagcagtctctatggtggcccattttcccatagaacattttttctttaaaatagaatgaaaatactgagcatacctttaaatgacttgatttatgttttatttatctgtcttaattattctgtagatttaaaaatgatttaaatcattttcagagtgggttaataccctgctatataacacattcaaaatttatctgcctccagttgtgtttatgggagacacagcatttttattctattaggcatcactacatgggtgacctactatcattttgaatttttctcctgtgttgaactcataatttctttgtctgcaagttacttgtattaagcttatgttttatacatagctcataagaaagaaaaaacaaaggaatacaatacacagatatatacatgttaatgttagtaaggttgcaggtaacttttattttctaatttatgcttctttgtattttccagcttttagaagcttggaaatactcttttcgtaataggaaataactgtttaaaatttctaaccttatgtgctattagaagttgggaggcgaagggagtctgctttatttttaggataataagcaattgagtaacattttatttgtctggtggtgttgaatagagagagattatgactcaagcctaccttgctttttttttcttttttttttcttttaatgagactgagtcttgctcttcagatgacccagcccagagtgcaatggtgtgataccggcccactgcaacttccgcctcctaggtttaagcggttctcccatctcagcctcctgagtagctgggattgcaggcatgtgccattatgcccggctaattttagtatttttagtagagatggggttttgctatgttgcccaggctgatctcaaactcctgacatcgggtgatttgcctgccttggcctcccaaagttctgggattacaggcatgagccaccacgcatggcctcaagcctaccctttaaaagctgagattttaaagttttcaaacttgagaagaaaaccttatgttattagtattacatgttttaaaatccattgtgatgaaatacagcatactgaattgattttgaccttatcctggaatcagggtcattactgtgaccttcaattattgtacttttggcctttcccttgctgtcagctgtcactgcagcaatgctaattggggcttttaatcatgtagcttagtgaaaacaaatagcatataatattttatgtagatagacttactaaattctgaagaatcgtctgaaagcttccttcttggagtgaaaagtatgtgattgtcttcttcaggacacggaagaggggattttatcacttatgttcctgtatttgttttaataactgatgacccatggcagatgtttatttttgcttttatgttcttatccgtgtatggaaaagcttagattgggtattggtaaggccttggaattagataggcctggatacaaattccactgatatctcttagtagctgtgtaatcttgggcattcagaataacctcttcaagttcatttcctcttctgtaaaatgaggataatcatgctttcatcgtagagttgttgtgaggattaaatgaagaattcatgcagtgtgctagcatagtgtctgcacatagtaattgctcaatattatcaataatgataactattttcattactaatttggatttgactgatgtctgccacttcttaatttcattgttcaaataacctgtaaccgatttggaatgtgaagctgagcaagcttgatagttgaaagaaaatattattatgaaatatttaatgtattcttcactgattagaaagattttctcaccttcccataaagaagataacacaattaaagaacatctatacatggcagagtctggatacctgcattacattatgatatttaaaggaatcattgcaaactacctcaaagaatcctgagaggttaaaactgagtttataattatatagacttggtaatttgttaaatgcagcaagaaaaataagattacaccataagtttttcggaaatttcccattttaaataaaattgtcaattctatgctgtatgtgatgggtatggaatttgtgattaatctgtaccaattggattaaaatgggttcagcaggtttttaaacttattgttgataatggaaatataaagctcgggaaaaattgtgaccatttttttttccattgtctactcatctttcatttaacttttattgatttaaaatcctttagtgcagttaactgctattataaagtctattgaagtaaatactcatataacatttttttacttatatgacagttgcttttggagtagctggaagagctgtgaggtactcatatttcatttttaaccatttggagaatagttttctatgtgtgaaatgtccacttaatcagcaccatagctctttttgctaagagtcttagaaatgaacaagatagtataaccactgaatgaaaaattttaaagatgttactcagtgaaaagtttctaaaataaaaggcaacacatgaattactctgaaaaagttatttttagatagcaaataaatatttttctttcagttatttgtaggaacatcaatctatcaaaacttttccctcatgtctttaacaggatgtaaagtatataatttaatggaataattaatatgaatagcagttgttgtacttatgtagcaagtatttgttattttgctgaggtagagaagtttctccctatactgaatgcttccagaatatgttttatattgtgtgtgtgtgtgtgtgtgtgtgtgtgtgtgtgtgtgtgtgtgtgtgtgtgtgtttgagtggggcgggggtgttgggtgatggtgatgtaaattttaaaaaacaactgctttttcttactccttttctatcagctgtcacatcttacccctgttgttacattttcttcagtagtcctttccttttaacatggaaaacaagtaatgaaggtttttaaaattgtgcaagaaaagtatgcataatttagttctcaccaaaggcccgaagagtgaactaaaaatctcaaaacctcctctcatgttacaaatgcagtacacatttattttaaaaagccagaaaatgttaataagaataaaaaggtcacttatcatctcacatactagagatcatttcttttttaagctaaaacaggaaaagataaattgctacaggtattttagcaggaagagcattgatatagggaaggaagattggtaataaccgatcttactttgaggatatcaagaaatgagagaatcataggaagccaccacctatgatatcagccacctatagccctacagtgggtgattatcaggagctttacccagaagccatgtatacatcaccctaacatctatccccacttctaccagccactgctgggggaagaatatggttgcttctctccagtgttcttactttcacatgagtgcctttcatccacagaacctaagccaaaatcctgcctacaagggatctgggaaatgtagtttccaggcttccaggcactgtgaaagagcttgaaagtatagggatgatgttgaaaattctgtcatcaacagataatataccctgcagcatccttccgaattcattcctcaacacacgtatgctacttacaactgaacacttaatcaggaccatagctagatatatgctgtttggtaatttgcttttatcacttgatttagtataacgcatatctttctaaactctgttactgtctatgtttgttttctgctgctgtaacagaatacatagactgggtaattgttaaagaacagaaatttatttcttatagtctagagactgagaagcccaagatcaaagggctgcatctggtgaggaccttcttgctgcatcataccatggtggaaggtggaaggtggaagggcaagagagtaagaatgagagagagagagagagcgcgtgtgtgtgtgagagagagagagaacgcacgcacacgagagcaagaggggtcagatttgcttttatgacaactactgtcgtggtaatgaatccactcctttgataacagctttaatccatccatgaaggcaaagcattcatgacctaatcacctcctaaagttcctacttttcagtactgttgcattggggattaagttctcaatacgtgaactttgggggacacatttaaatgatagcagttatacatatatcttaaaatttttgtgttaaaaaggaatatattaatatttttggtaagctgcttttatcacttacgatattgtcaacatctttttgaatggctctttagaattctgttgttggatttattaaataagcacccagtgctagacaatttagatagtttccaacttcttgctcttatatcagtgatttgctctgcatctttttgactaaaactttgtatatgaccatttattcttcagggaaaattccaagaaatgtaatttccgagtccgattgtgtggtccatggccttttctgacttgtattttgcttcttcctaaattctttttgcttacttccatttctctggtaactggatgccagaaagttgttgtggagatataaaaattcaggatggttttaacacttaggcccttttgcattgagagtccttaatcctcaatcatataagatacttggacctccacccatgcttcatataaacactaaatgtgctttaaactaagaaagcctaagaacttctgctaaagattaattctaactttccaagccagggaacagtaggttggaccaagggtctctagagactttacctctttcattttacacttccttctttccttcttccttctcaccctgcttttctccctttttcattccattctattgtgatcataaaaagtcattaaggtatttagtatttagagatgatctgttattttatttttattttattttatgtattgtattgtattgtattttaatttttttgaaatggagtcttgctttgtcacccaggctggagtgcagtggcgcgatcttggctcactgcaagctctgcctcttgggttcacgccattctcccgcctcagcctcccgagtagctgggactacaggtgcctgccaccacgcccggctaattttttgtgtgtttttagtagagacggggtttcacggtgttagccaggatggtctcgatctcctgacctcatgatccgcccacctcggcctcccaaagtgctgggattacaggcgtgagccaccgtgcccagcccgatttgttattttatacaagacttcccagttgtgaagcttatgttgacatgtgttccttgctggccatttcagcctgggtgacagaatgaaaccctctctcttaaaaacaaaacaaaacaaaacaaaacaaaacaagccttggcttagggttgtggcttctggctacagttacaagccttctgcatttctgtaagtggctgtgataaacagggaatgctggaagatctcctccttgggggctcatcagtggatctgccagtaataaggatttcatcactggcaggaagaccttaggtaattggaaaatgatgagcaactttaaatttaggagatttttcttttacaatataggcacagttccttggtaatctcaacattctggtggtgccctttgcttctgaccttatttaatagactcttcacttgtgttgaaagcaattctacaaataccagcttttatctagtgtttacatgggcagtcctgcttgactttgaatttatttgttagttttttgattattacatgtatctttaacattttctaactagaatagaatacttttttcttttagaaatggcttagttttattaggaagataaaatattctatgtcttagaaagcaatattgaagccagcagcaaaacttaattatctgaaatgaaatacagatgattaaattatttcctaaaatcaataaaattgaatcaactgaaaaaatcaatgtgctatataaataatgccttttaaagtatttcccatgtctttgtggaatattggctcagaggtttgcaatctgggcagcaatgtaaagtttcattcataaaaagtattctagattttttttttaagatgtcagaggtctttagcattggcttccatgaacagttaccatgggtctactatgtatagggcatgttgacaggcactggggaagcattatggctctagagagatttccaatttggtcagatatacaaggaagacacatagctagaaagaacaaatacatgtaaatatatggtcgcatataccagtctttaaccatgtgcaaacaggagtttagagaatttgatgatggccatgatttgggatgggaaatcttccttgagaaagtgttgtatgaagtgaagggcaacctaaggcaagtatggaggagcaggaattctaggtaaggctgacttatcaggttgtgcaatacacaaaggtcctgtataaaatatggaaatgttctcattcttgccagatgccatagacttgtatacattttataacagtttcggatagataatctgacttctcaagccaccttggctccttgatattccttgattatccgaggaagatttcttccttaaggctttgcactgggttgttcttctatctggaatgcttatccctcagatatttcctatttacttcaagcatttgcttaaatgtcaccttcatgatgaaacttaactagtgtaccctatttaaaataactatttccctcacctgcatataaccatgctatagcatttatcaatattgaatataatgataattacatgtaattaataagttcattattgtgtgcctctctctccaccctcttaccccaaaagagaaagtctcatgatggtagagaaatttttcttctatgcatttttagtttactgatctatatcccaagtgcctagaatatcaccttgctatgtagtaggtactcagatatttgctgaatgaataaaggtgtgcatgaatgaagttgagtaacatttatagaacagaaagggcaggaggcaaaactgttacacagtggttgggggcagaaataaatgcaggagaaaatattatctgaagactgtggaaaaagacagtgaccacagtgcagaaacatggagcagtcaaataagaaaagaaataaaaaaattcagtcatcagatttggcagttgagaggtcgttggtgatttttgtttcagttggataatgtagatggtgagatgcatactagaaaagaaccaaggaaatgaagacatcattcttatgtaagactgttcatgtttggtacccgcctgctggacatcattcagtcacatcatacgtatacatttatctagagtgacagcttggcatctagcagtaacatggcattctttaacaaaatcagcattttaactcaattgaggaaggaaggaagggtgccttttctgattgataccaaagggtcatttggccagtgtctacgtagtggccctgagtggaggcaattccacaagctcttttgggaactgatgtttgatggaggaggaagaggaaatgatggagcacgtaaggtggaaagttatagaacaggtaatgggtaggataggttagccaggaagaagccaaggacagagagaccaagtgttagagtatccagctgcagatcgatgagggcatgggagtggtaggcaaaggagtagtatgaggcaggcggcagagggttgagaggagctgctgatggattgggtgtgaccaagagaacaaggggtcaagaatgacttcaaggccataagtgtgggaggtgaggcagattaatttatttacacaaatggaggtgtcagttctcagaaaatataaatttagttttagccatgcttaatttaagatggctggggaatgttaagataggaatttctggtagatggagtttttcaacaaatataaaggggaggactcagttttgttagtttttagtgaaaatcctgcagtggggataaagatgcatactcagcttctgtagtgagtatcttaggtgaatgcccttattactgtctttgccacactttgagaatggtattcttatcatttctacctgaagttagagagattttatcatttatctggcatcttgcagcttatgaatgatagagttggaggtcaaatgcaggtctctctgctgccacagccctcatattccattctactttctgcttgtaccctcagaggtcacatttggggatgcctaggaagtctgggattgagtagcgcatttctggcaaatatgatattttttatagctgtgttttacattcattacttcaaagattatttggtctacttggatcaaatgtttgttacagctgcagaagcttcctgctctctgaatcctttttggaggtgctggttttcttctgaaagttttaaggtgcttttttcttatgaaccaactgctcagatttttttaaaaaattaaatatcctgctacctcattttttctctatagcacattcccatgtcttaacttcgatttttttcttttctttttgtgtcacctgactttgttgagaaggctggagatacatttcaagcccttcctagtccttaaaattatttctttcacactagcagattatctcatttcaattctgcctttatggtttaacgaaaacctggtttaataatccagcaatgttagccattgggattcatcctttggtataataacatcagtatccatggctgggaaattattaggttctctatgtgttatggcaaatacgggtatggatatagataaatgagttgccttatatcaagagactgcacaaataagtctgtaagctttttttttaattctttaattttatttgtatcctactggccttcgctctccttcccctctcttgttgatacatagatatgatttatatcctcatggcaggtgtcatactttgtataacttcataaatattttcttaaaggtttaaacatgtaggacctcaggttattctaaaatacgtaaaagaacaaaacaaaatcataaatcaatgtaaagaataaatgcatattatggagaaaattacctaaaaaactcctacataagactatctagcggtacttaggtgcatggcaatagtgaaagggcagaaaacaggggatggtaccaaaaatagatgcgttattcttccagaatgtgaaacattatataattgcttacaaagcaatcatcatatgtagacaaatgacacagaatggaagatgaataaagtcaatgtaagattaaaaaaaattgaaacaattacatctccatctgttacactgataatgtaaaaagatattgtacattcaatcacagatggccttttaatcactttagaaacttagcacagaaaactaggcaaagtctgtagagacccttggtctagcctcctgtcctttagcttggaaagttagaattcatctttagcagaagttcttaagctttcttagtttaaggcatgcttaatatttctctgaatttttttttatttttttattttgcaggccaaaacaataacagtttttgttgttgttttttttgtttttttttttgagatggagttttgttcttgtagtcaaggccagagtgcagtggcacaatcttggctaactgcaacctccgcctcctgggttcaagcgattctcctccctcagcctcccgagtagctgggattacaggtgcatgccaccatgcgtggctaatttttgtatttttagtagagacggggtttcaccatgttggccaggctgatctcgaactgctgacctcaggtgatccacccgccttggcctcccaaagtgctgggattacaggcgtgaaccaccctctccagcccagttttgtttttaagtagttatctctaagcaatttaataaatatttatgtcccaacaacatagtagttggttgaaagaaaataatacaagtacattgaaaggaaaaatatttttatttttattttattcttaaatacccacaattattactaatgggatgtgtgtgcctgttgggcactacataacttctcaaatcttggaataagattacacaccaccacaccctcattttttgttttacattgattgttgtaccatgtttagttgttaaccactgcatctgctgaatatccagcttcacaaagatacaccattaaaaggaacttagtgggatctaatgttaaaactacacagtaatttgagctagtaattcatgcagtatcagatgctgaatattcttgtgatttttttggtgaaaatttaaaatatcctgcagtgtctctgagtttgctgtggtgttccaggataccttggtgtataatttaggaaccaccaaccaataatcttaaactagtaggttatgggacacaggccagaaattatttgcttcctagtgctttttaatcacataggtaaattgtcagctacaatacctgggacatagcagctccccagctggtgtaaattatttttcccttgctatactgtcagcatttatagccatatctttccatggtggtccgatttatatttacagtccagtaatctttagtaagtacagtctggcatatcttattgccaattgtttgattttatgtggaagtgggtgacacagttattactgagtctctttataaaaatcttatttacgtaaaatatacaaggtaaggaaatgcattcattaacaactgaagactgagtgagtaaaaaaataacttgtggacactattttcttgtataattgaaaattatgcaccactaccaccactaccacaaatagttttgtataagatatgtctgttaagttcagagaccacaaagtccctattgtgatgcaataacctcggttaactgagcatatcttctccatgtcctggtgaggatagctatttcagaagatcatttataggaccatttacaaaaatacagtatcaatcacactgcttattttagcatgcttcagttgtggtttacaggcagtgatccctctgtaaatggactgcacttatcaacatgctctcatggtttacaatgatcttgacagcagatttagtggattgaatatgggtctgatatggtatggccttctcaaagtctagactttataaggtgtaacatttcactttgcacgtggaagagaaacttctcatgttctccctgttaagagttgaaggcctaaaaacaatttgcaagtactgtgttgatgatttagttattagcacattttccaaaagcatgtagagaaaatatcaaatttgcatgcagtggtaaggggtgcataaaggtaacttcctcctgacgtgtggctacaaagtatactatggatatactttgcggctacactgtaccacgttttcacttctcatatcctgttaattttcagtaggtttcctaagtgtcgaagcttgtagtctatgtagcaaatgtatttctatccatgtgtaactgtttcaaattatggaaaatatcacaccttgagccttgagctttactttgtaatgtgtttagtgcaggattgagttccttgaaaagtgaagaagaagagataattttagtgagctacaaatgcctgctgatatatattaagtatgctgaaagtgtatgaatataaaaaaaggaattttatggagaaagaatagttgaaagacctaaggagattcttgaaggggtcaggtttcaggaaactaaagagccacccagctaagatacagatcaaagtaagccttatgtttattgcttatctgttctgggaaaagcagaggcagccaagtaagacttctgatctgctttcaaaacctaattcaccagttattattagtttggctttaggcatgttacttcattctctaaccacacgtacctcacctagaacaatacccaggcgggaatgggaacaatacctatttcataaaataatcctgaagattagatgaagtaacactgcaaaggacttcactcagccttgatacatcattctgccttagaaaattccaatgaattcattctctttcctgtcctacggagctcacatgtggctggctccttgtttcttaaaccttccctcaatgtgtagttaactgtgccatcatctgtgcctttgtagcccttcacaatgcatcccattatagcacgtatcaaattgtattatttattcctgcttctctttgctagtgggctgtaaggtcgttgaacatgagggaccacatcttattcagcaccttgcgcagaacctaataagtgctcaaaaatgacatgcagtgaatgagatgattggatggccgcttaccgctgttggctcagcccagacatttttttattaatatatctctatgactgtgcccttgacactctcttctatatttctagatgcttagtaaaagaaatagatactttcataatttatttttaggaaataataactgcattgtgaaaaaagtcatctaggaaacttttctgcccccacccttgtaggtaggacaaccatttttattctttgtgccctctcagaaccacatacatactttcatcatcttcatcatatacttgaaccatttattgaactcatttgtttgtttttctaatgtatagtaagcttttggagagaaggcattgcatctagttcatctctacatccttagtactcagagggtatttgttgacaaatggactgagtgtatccctttcttagactgagacattattatttttttagaatgaagaaccttcccattacttaaaatactttgtttttaaatggaactacattgcttagaatagtttaaaagatgttttgttttttatgttcatgtatagtatataatctgttgcatgaatattttacttacatattttatgggatatgtgttttcagtagatatatttttataggagatacatttttaaatacctacaaaaatcccagtactgtgaagtatctgtgtcattaagtgtaataaaacatattacagtaacagtaatctgctgaatgcttcctattaccctgcagggaccctagagattgaaagctttattttggaaaagtcatctttatggtaataatgtaaatggatgtattaagtaacagagcacttataaagagatccttgtctaaaggcttggtatgtagggcagaaaaccatgcttcactcagaaggccactggctgtggtggaaacttgctgtttcttcatggagttgataacaaatattttttcatgttattttttctcacatttatttttcaaagtaaaaacatttatttttcatatttgtagaattcttctatttataaaagtaatttctacttatgaagagagcagaaataagaggaactctcactacccagaaataaccattgttaaatttgttgtgtgtaattccctacatgtatacatgcattatatatatgtattcacgtgatgatactcgttcccccatattttccaaaatgaggtcatagaacaggtgctgagttttgatctgcttccttttttttttaatttaataatgacattctttgcccaaaggagtaataaaacctatttttatctaaaatctctggagaacaaaacattttacctaatagttttcaagttaggtaagggttttcatactcatattttaaactttttagcttttcataaaaaatcttttaagatgtggcacactctagtggttatgagactttgggttttattgaacagtgtagggaaaagagcaagaggggattttagaaagtaaggtacagcaataaaatttcataaaatatgtcttaatgtgtactatccctttcatttcataaaggagaggaccgattctagcaccatacatgaaggaagagtataatctcagaatgccaggctgccattcaggaagtaccagcatgctgtctcagataagcggttctgaggaactgcagtctatggtttatgcacttactgagttaccgtggtgtcatgggcagggtgaatgcacctgaggtggtgcaggacgccaaatagtgtaactagaagtcccagaggaggctaaagccttcttgactaaactgcgaccctggtgctgtgtgggtagctcctttcctgcctcacttcctccttttccttccctcgtggcattctcagctttccatatgccctttctgggtcctggttgctcctgttccctcccctgttgctcctgatactcacctcttcttgtcttttctctctttctccctctactttttcaattctcatggttttctctgtagagaaaagctgatcttttaagacacagtggtctttttgtatgaagtatgtaaatgcctttgactactacatacatatgcctacatatgaaagtagtagtaggcatatgtatgtagtagtcaaaggcatttattaatttagttgttcaatatatatttactgctgtgtctctaggcaacagagatgcaaggccaagccaaacctcctcccttgggaattctcaggacagtggcagttactttgggtctttagcacttatggcaggtgtcagtgctgctccggctccttgtgttgccatctgggtactgtttaaaccttattgtggactgtggatttctttgggtgaaagtctgtttttctcacccttctatctgttgagtgctgtgcagtgtcttgtacagaatagatttattttcctgtctatttctggagaggggctttttttgaagatctgatcaatgattggagtcaaactctttagtcccacatgtgatccattgtaaactaactggcaaatgtttcatatttcccctctaatacataacaaaaacagtttaagtctgaaaagtggtataaatggaacggaacatgacattcctgtagccatttttttaatacagattatatccctgattaataacaaaattgccagtctttttaaatataaaattacaacaaccatatagaatcacacacctccaacctctgctgatcttgatcttagtacatgaggcttgggttgcgattagatttattgtggcaggaggttttgtgtttgaggaactaaaggactttctagtaaacatagatgcaggagagcaaatttgtgagtaaataccttaaagtctttatataagttttttgtagttaaagtcactaacacagaacaataataacagtacaataaatacagagaatgtacgtggcattttagatatcaagttggtaataatggctgctgtgcgattaatttgatgaaagaggacagtgatgatcctgattggaagattgatagctcttgggtggggtggggatggggagaggcactccacttgcttttcttaaggacttgctcaaagtaagtctgtgtctctaagtggagagctttatcaattgatttctttttaacatttgatatatgtccagtatgttctgccaaatgcaggttgccaaccagtaagttacagaaatggctccatggttctgcagtgctctggctgcctaaattgaacattatgtatctgtgttgttctgatggaattagaatcctgcaggtgcttgtggccatgggagaaagtgtgtggcagcacctctggcacggagagttacttcctgcaagaagtccaagctgaaaatggatccccgctgggccacatttctggtgccacttcattgagcactttctgtgtagcagcagtttcctggtgttactgctgaattgtttcaggggtaatttcctgtgagttcagtatgcatagtaacaataaagaattttcatattgctatgtgattaatgtttattaagtataaaatttcacagttgtgtaaaaatatgcaaaatttataactaattcatttttgagcaaggacacatgattggggtgggattactatttaataaaaatgctactctattatttattgtaagtcttttacaagtgtacagaaatcagtgacgtggccaataataccagtttttctttcctgtgtcactgggtagtctaaaggcatagtgaggtgtttagtaacttcatagtttagtaactgtgaagccaggctgcctcagtttgaatcctacctcctctaactattggctgtatgacattgggcaactatttaacatctctctacctctgtttcctcatctgtaaaatgggggtagctgtgagaactggataagattgcttaggatagtgtctgacagagtaagacctttgtaagtgttagttctactaattattatttttcagattcctgcattatttttataacagcagatgacaagcaatgtgaaaaagtaccattataagtacaatgtaagtggaatacaaatgttagccatggttttctacacctttgaggaaataatattgatttttgttccccactcacgtcccatgggtgagagtccgattccttctccaacaagtttctgaagccttggggcttaagttctcatgatcattgcagccctgtgttcctgctcctgcttcccatagctcttttttttttcctcttcgtcccaaactgacttggacaagaaactcagtcccttcctcttgatttctcctcattcccccagcttctctcattaagcatttgggtgggcaacagacttcatgggaggctttggcagtggaggtgagaggggctgagatctgttgtaaacaatttatagcaccttttgtgttaaagcaaacatgactgcctgatagaatagaaagcagaatttacatatgataaagaaattctagctgtgtggtagactgggccacttcaggcaaccagaacaccaggaatgtgcatttattctcctctgtcattaggggtacttctatgggggaaatgtttggggaagtacatttgataattgcatcatatagtgagcaaacagtttgaaatttgtctttcagtcactgttctacagtttgcaggtaacaccctataatatttatatctgccgtttttaaaagttaagaattattaggaaagcatttattgtctttaattatagagagagtaatgtaaccatattgtctctttatctttttctttttgggagctgcctgccaagatttaggaatcattttgtttttctaaacacttaatttcatcataatgaaatttcttgtctaatgagatttatatcactttccttattatgagagttcagcttgttttaattgtgatgtctgagaacttatactgaaacttgccgtagtcaggaagacacctgtcctaataggaagacattttacttaatgagttgatgccagtttaaatttctgccttgttttacttctaccttttcttctttgagtagtgaaaattgcatttttatctagctttaaaatttgctctctgcagtgagatctactacatgaaatcttttctcaaagtgatctgtgtgaaaatttaaattaataaacatataccattatttggaatatgagctttaatgaaaattcttgcccgagtaaacagtgtccatttacagtcaactataggaaataatttaactatttacaaggatgcttttgagggatgacattggtagtcattgattgttgcagccccaatcagtattctgtgtgtgctttgactggtttggtgctacttaccttcacatgccaggggtctttctttacagaaccgatgtgttgatggtgaatcatgatgcactgttcttgcacagaggtagccctgacatttatttcatgaaagagttttcctattttgggatcttgtggggatattcatgaacataatagcctacccaggaaaaaagttagatatggtgaagaagaacaatgccatatttaatgcttgatctttaaaaaataagtttcttataactttggtcagaagaacactgatatagtttggctgtgtccccacccaaatctcatcttgaattcccacatgttgtgggagtgacctggtgggaggtaattgaatcatgagggcaggtctttcctgtgctgttctcatgtgagtgaataagtctcatgagatctgatggttttataaaggagagtttccctccggaagctttttttgcctgctgccatccatgtaagacatgacttgctcttcctcaccttccgccatgattatgaggcctccccagccacttggaactgtaagtccattaaactcttcttcctgtataaattacccagtctcaggtatttctttatcagcagcatgaaaatgggctaatacaaacacacaggcttgtaaaagtagattacttttaagtaaacacttttaccctgtgatttttattataaagttggagatgggtacttttgggaaaagtattttcctagatgtgtaaaaatcaaactttaaaaaggagcaaatgtttaaaattgagtctagtaaagtatttatagaaataattttaaatgttattatataatcttgctgaaaaataagtcactaaataaagttatactactaaaaatgaaaatgttcgtgacagaataactggctgtaggaacatctcactgaggattattatttttgtaagttgacactggagctttagcaacttgaccaagttttttactctgtgtatatttttaattctttcattctctgattttagttgacctcttttagctgtttccagaatcatctagaagatcttttgtattagtcatgagctggaggccaggtagtgctcagcctaatgttaaacctcatacaaatgggcacatgagaaaggagtgggcagttattgttgaaatattattgctgacatttaaaatggttatagggatgggggaaatctaggccaagaaaaaggttatctttgtcttcttcagacttgagggcatggagagtatgacatgagcaaacctaatacttgattttcagaaattcaggggaaaatattcactgacaaaataattttagaatgtctataatttttagtgaatatatattgatgtagcaaatttattgtagtctttatatatagatagagaggagtccacatcatttttttttgtaactaattttttggtttttgcctaaattcaggtagcaaagatgaaatgttggttaaagaaactaaaaataaaaaaatagaaaaaaggggaaggagaattagaaaaatcagaaaaggaaatttacaggggagtgaagagatggcagtgatacgtgcatttgtacaactccttcaggttaaaagctgctccttggactgtgaactccttgggaaaaggcctgtcttctctttgtatctttagcatctaatcttgtactcagcgtgtgcttaaagtggtacctagtacgtaatgggcactcagtcagtgcttaatgaatgaaatcaattaatgaaacttagatttctcatgggttatttcacctgatacaagtcctttaaggaaaacgtaattttccccatattataaaaggacaaaccaagactctcatgggttaaatgattgccaaataatgacaattctgctaacaatgacatgccattatgacatattaatcacataaaattagggatatatttgtatttcatgatttataatttcattattattagcagtaagtaatatttagtgaaagcttattgcttcctaaaattatgcttgacatgcaaatttcactagactaaatactatcctgtaaggaagatagaatcatctacattttatagtctggagtttaaagggataggttacctttcaagtttacctagctagtggatgggtgacttgaaagcagcctggtctgacccctgagctcttttttttttttttttttttttttttgagacggagtcttgctgtgtcccccaggctggactgcaatggcgcggtctccgcacactgcaacctctgcctcccgggttcaagcgattctcctgcctcaacctcccaagtagctgggattacaggcatacaccaccacatctggctaatttttgtatttttagtagagacggggtttcaccatgttggccaggctggtcttgaactcctgacctcaggtgatccacccgcttcggcctcccaaagtgctgggtttacaggcatgagctaccgtgcccaccccaactgagccctttcttaatgactacactaagttacctccttctagtcacacagttcttgatggcagagccaggatttgcatccaggtcttttgttcctagttttcttcccctgtatatcgtgcgtgtgtgtgtatttcatttgccttgtagtaggccatgatcagggcatataataatgaccaaaaacctgaattctgttagtatagaatttggtagattttctgaaagatatttgattaaaatgatataacatctgagaggagagaatgactatcactacctggagttgccatgcaaggcttgacacagaaatgtaatggcgtgaagaatgaggaatactccaggtagaggaaaaagatgaatgactatgcaatttattgtccaaatcagattttttttttttttaaagaaagggacactagcaataattgtggtaggacatcagggcttgaaccaggaccatctgtggaaaccaggccagtggtctttgtacagaaattctgttttaggcagaaggagctatatatacaagtggctatttaaaattcacataatatttcaaacagtgttagattaaaaaaaccaaaataataaaaccctacaccacatctgccttataggagtaaagtggcaatgaataactactgaagaaacagcttataaatacctaattagggagaagagagttctagaatgatctagcacagtctattcaggaagttgtatgatctgaaagtgtcttccatttttggtagaaaaatggctaagtttggtgcagatttgcagagcacagaaattaaggtatttactagagttgggggtaaagaaggataaaacatttaattcattgaaattaatttcactgtgaacatatgactcaaagaaggcagactaaaggtgtctggttgtgggaattaacagaattcgagttagtctatccatttatgtttccttgttagatttttctcttcccactggaagtgaaacactgttaattcactattgagccccagacagaaatagtgtgtatggtgagaatgtggtgaggggtaatagagattgtttggattagcaagtttctgaacagaatacaaactccttttgatttagagatggcagtgtttatgggaaggctaagacaaggtgggaaaaagaaaagaccaagaagtactttgtatacttaattggatatacttcaacctggttagtattctatatggctaatattttcagaagaaatactacatagaagtagtggtatttattaagaaaattacatatgtttgtatgtgtaaacatacagataacaatatatatgatatatgtacatgagccatagtgtaatggttagcactgtggactccgatatatgtacacaaatctgactcacaatttactacttcttgctgatacggtgattttagtgcaaaacctaagcattgatactaagaaagaataaaattttatttttataaaattaagattgtgaaatagtgagcagagctaaaatctggagtataagccgtaaataagtttctcaggtaataaaatcaaaagcaggtaatacaataaagaaaaaggatagattatctcaaattctgttaatttccacagccagatgcctttagtcttacttctttgagacaaatgttcacagtgaaatcgatttcaatgaattaaatgttttatctttatccccaagtttagtaaataccgtaatctctgtgttctccaaatctgcacctaacttagtcatttttctgccaaaaatggaagacactttctgatcatacagcttcctgaatagactgtgctacatcattctagactctcacctctctaagtaggtatttataggctatttcttcagtagttatttattgccactctactcttgtaaggcagatgtggtgtagggttttatttgtttatgtaaaatctaacactgaaatgttatgtgatttttaaacagccataatagtatatatagctctttctgcctaaaccagttttttttttctgtaggaagaccattgtcctggttcaccacagatggtcctggatcaagccctgttgtcttaccacaattattgctagtgtccctttctttaaaaaacatctgttttggacaataaattatatattcattcttcatttctgtctacctggagtattcctcattcttcatgccattacatttctgtgttaaaccttgcgtggcaactctgggtagtgatagtcattctctcctctcagatgtttactatttttatcaaacatctttaataaaatctacccaattgtatagtattatacaataacagaatttggaggtttttgggcattgttatatgccctgaaaatagcctgctacatggcaagtgacacacacacacacacacacacacacacacacacacactctacacaggagaacttggaacaaaagtcctggatgcaaatcctggctctgccatcaagaattgtgggccataaggagataatttactgtagtcattaagaatgggcccaggagtcagacccacccactggtgctgggtaggtgaatttaggaaggttacttaccttctctaagccgccgattgtaaaatgtagatgggcctatctttaaatttatgtaaaatttggagatgatgctaaattcagaggagtgtgcgtgccgagaaagaatatcaattaggtagaaatatagacagaaaatagaatgtaatttagtacagagaaacagtgactgatatatatgagaataattttgtttcaaagtgagtcagggtaggcccggcccagtggctcatatctgtaatcccagcactttgggaggccgaggcggggggatcacttgaggtcagaagttcgagaccagcctggccaacatactgaaaccctgtctctactaaaaatacaaaaattagccaggcgtgttggcgggcacctgtcatcccagctacttgggagtctgaggcaggagaatcgcatgaacctgggaggtggaggttgcagtgagcctagattgcaccattgtactccagcctgcgcagcaagagagaaagtccatctccaacaacacaaacaaacaaaaagtgtctcagggtagagaagaagcctgctgaaaggcattgagaaagaaagtggtgttctcctttgtagttggggaaaggaagaggggagagtaggttgcctagtctagcgctacgtgttttgctgatctgagctacagtttaaacactgggtttgttggttattgctacatagaaattatataggccaactttttctgaagttgaagtcacttgtggggaatgttgcactttgtttttagttgcactacagattacctctttcaataaagaagatatcacagtgtggggttaataacagtgttctctgatgtattttattatgccagtaagaataataatacaagattataaagtaaccattaatcctttctttttactttatgtagaagaattaacacactattcttaagtctgatcttaaagatactttacaaaataaccccccccccaaatttttggatagaaccaaaacagcctggttggaggccagaaaaattgttattttgtaaaattaataattatttcaagtttaatgatgcatatttcctacttaattgtcacaaaaatgacaaagcagaaaatgaactggaaaaattaaagaggtgccagaaaaattattatgtatttagtttgggtaaggagatcaaagcacctgtgggtcatgaaacatcagagagggccaaatatctgagcagggggttgtgttggtgtatgggttggggtatcgtagtggtaccattcagaagtggcacttatacaccctggctttctgtgaacagtaaccaagggtttagaactgaaaattaagacgcatgcattgtaaaagatttttaaaaactttctgaatatgaaaggcaatatgagggatgtaatttggatattcaaatatgggtattctggggacatttatcacggagatagaaggacaaaatagtggaatttacatttcatagaagattcataaaaagccagaatgaatggttgcagattttatgtgttgggcagatttctatcccaaagaataattcttgtgatatttgatacaattgtgatacaatgatttaaaatcagattacatttatttatgagagtattattgatattgctgtttttaacaacatgcactggtgggtcactgtagtcaaaggaaaatactaaattcaatccgtgattgaagccattaagatcaaagctgacttcctggagtttgactgaagtgtgtctgccatgcgggtaagagcgcagtcctcatggctactgctcgctgccaggttggacggagcattggtgggtaaagggtgcagcctggggcttgggttggcccagagccttagggttgaagcaaaccatggagaagttctctttgactagtaaaaacatactaacaagtgtttcatctatttctagtttaacttaataacttatgtttactttcttgttttactttacagactttctttgtttccttgcttttgaatagaaatacaattggtagaacatttgttaatgtaatgcttttggatgtgtttttgttgtattttttttaaacttaatttttctgatagtttttctttcccatggcaaatgcaggtttttttttcatttttattttgtaaatttgagtttatactaaccactgcagagcagcagcagatataaaagcatgatctcctgggtgggggtgtgctgcttgggagagcaaagggtgaggaatggagcagtttgatggaagtttccagcatgggtggaattgaaggaagaaagtacaagtttgtacaaacctagatgaataagattcataagaagaggaaagctattttggaaactacccactatacaaaacctatccacttagatttcttgaagctttgggggtaaaaccaaatgaaggaagtcctcaactttgtttgttccaacaatttaagttggttgtagtatgttttcctgaggaatgacatcctgccaggcattccttagaatggaacacaagtctagataagtggcaggtgcctgcagtccagtcctaaggctgctgtagaacccctccccgagaggctgcgtagcatggaggggaagggtgctggcaggggcttcagatttgactctatacttgttagctaccatagctttggttatttgtggcatctcagtttcattatggatagaatggaataatggcatcttcttcatcgggttatgtgtataaactgagatactccatggcaagttcttagtgtcatacctgggacatatgtcaatattgtaagttgtttgtaggaggcagggtcatggccgtgaggcattatcttgtccttatggagaaattaattctgacttccagttgaattcctgcatttcctccaaaattttggccaggccttttcatatgctagtccccttgcttctcaccatactgtttctcatgacctttttgttcatccttggatgttcagttcagccacttccttggagatatgaatctcccttcgttggaactaaacctagtgggattgacatgtcctgttcatgtgtttctctctttctcaagattatcatccccttcaggaaagaacctgtagctcccagctccctagtttgggacagtctgccatataagagacagaatattatggttgttaaaggcatggtttgggagccaacagtgtgggttagaaccttgcaccatcacttactggctatgtgaggtagggccagttgttttacctgtctgtgccccagtggctttgtctgtaaatgggaattgtaacagtacttacctgtatcaggtaagtactgttacaagtcaagggcaggttaaatgaggaggaagagacttaggcttgaagaggtgggtaggcaggtaaatgtacctcctacatttgtagataattatctttctgtaggtttgttatgcttgactattccatgttctcccagtgatgattttccaattacttatcaatttactcctggggaattaaaatgtaatgttttttgactgtatttttcttttcttttttttttaactgttggtacttttaaaataagttgtggtgaggagagttcaaattacagcataacagaattcatttagtgaattgatgtaacattagcattagtctgccattagcatatcatatagcagtattatccaggtaaggaaaaatatgccatctcaaaaaaataaaaataaaaaataaaagcgacagacttatgtgtcaccttttccctcattttgaatgttgtactctaatgaggaaaaaccccagctcccctccttctggggcaaggcaagcatggcgattcttgttccctgcttcacagggagctgttttcttggctggtgtgccgttctgaagctcctctgccttggaagggcaggcagtccatttctagcctagataccctccatgcttgtgttagcagctgctacgaccaccactgctattccaattattaccactacttctattccactgttatttttactgctgacattactattgctaaaccaccactatttccattgataccaaaatcctgactttagttactgtattctactacttctttatcatgtgtgcagaaagaaatgcttattttccatgccctaagtagagaaccttgcaagctttctttggaatgtagattgtgccatatttttaaaaatttttatattttaaaaaattgtttaatttttttttgggccaggcatgatgcttatgcttataatcccagcactttgggaggttaaggtgggaggatcatttgaacctaggagttcaagaccagactgggaaacatagtgagacctcatctctacaaaaaaataaaaaataaatttgtgaggcatggtggtgcctgcctgtagtcccagctagtctagaggctgaggtgggaggatcacttgagcacatgagatcagattgaggctgcagtgaactgagattgcaccactgcactccagcctgggtgacagagcaagaaagaacctgtctcaaaataataataataataataataataataataataataataataataaataatttatttttaattttgggggtacatagtaggtgtatatatttatggggtacatgagctattttggtacaggcatgtagtgtgtaataatcacattatggaaaattaggtatctgtcccctcaaacatttatcctttgtgatataaacaacccaattgtactcttctagttattttaatatgtacagttaaattattattgactatagtctgcctgttgtacaaatactaggtcttattctttttaactttttttttttttttaaactgggccccatctctgggttgctttgagctagctgtcttctggctaacaaaatagttgagtgctactttctttcaccaaaggcagcgacatgcaccactttcattagcaggttaattaacttaggaaaatagatgatccaggctaactttgacctctgcacttccaaggtattcagttttttagtgcaaagactaaaaacacaaaaggaggagtaaagatgctgcttgtcttccttttgtatgtccagggactaatgcaggtgttgacagaaaaacctttgaaactgagtttctaagtctaagtttctgccaagggagaggggtgcagtgcttcctcttataaggacaagagctgttgaaagcagcagagggcttgtgtgtgtgtgttatggtgactgctggccaagggcccctgaaaatcagttggcagcttcccattgaacacacaccagaggcaggaaacacagactaaagatcatgcttaagaatgtaattgcctaataatttaaaatctttattgatattatttataaatattaatataacttctaaaaatgttcttaggtaagtttaaaaagacacattgctacattaacattgaaataagaagatatgatgacaatttaatgtaaaattttactgagttccctgactactaaggaatcgttgcatttaatttttcctagagataaactgcatcaggattcattcatcaatttatttgaaaacatgtatgtgctataaaagctttgggatacaaagacaatatagatgtattctttactctcaaatatttactatttcttagggcactaggtagtcagacagatatattatagttaagcacagttattaccataacagatgtgagccgggtgctgcagagcaaagagggtgcatgtgtttttacaatttagccctgcatttatgagcttagccatttcaatataattacatataactcatgaaagtacattatcattgaatactgtgaaaaaaaacctgttaactttaaatggtaaattactgtatttttgaacgaatgacttaaaaaattacccattagaaatgagttgtggcctggacaataatcaaaacagaaatattggcttttaaattgctgagaatagggaggttttggtttagtgaactgatgacaagattacagctaaggaacaacccttctccatttatgtcctctctgcatgtcctttagggtcatcatttactgtgatattagcatcagtatgaaaataatttgaagcttcatattgtgcagtcctaaactgataccacatgtagcatacttattttgtaattcaggggatatttgaaggtatgatttcttagaatgaggatgatgatgccccttctgttgggacccactgatacacgggggaaaaggacaaataaggtcctcatacaaataaaaattattcttttattaaatttctaggagatgtaagatttagctcacctaattttaaaagagagatatagagaagatatggtgaaagggacagaaatagggaactccagtaagagagaagcttgatattattatattccttacacctcttcctccttaccagttaaaaaaaaggatgatctgagacctttggagaggtatagaggaggagttatgatgagaagagaaggagaattcttcttgtaccttaatgtttgtaaatcggtttcatggtcgtctcttctgtgcctttcgaaactgccaatcatcttattataatggccactcataatttgaattatgccagaccctcaaattcagggccgatctttcaatagcaagtgtcctactgagaacttctttattctgagatgctgagagcttctttcttcaacacacaggttggctctgggtggtccttgcctcatcaaatataagttagaaaatctacattgtgtgaaggtctattagcactcaccgaccttctcatgaaatgtcatttctcatttgggactgaaataactcatctcacaataagctgtagagatttttcctcttccattgcctcagttaacaccactagtccattattcctagcaactttggagaagtcggtgtttattttttcaaataaaaagggaagccatcctgtttgcattcatatctttgagaaaagtcaagatggcttttacacatagagaaaaaggaaaccatacacttttaaggggtagaggaaaaggagcgattcagagttttgtagtgaactttagcagtttgaccttcaaatgtttccttttttaagcgtcaatattgctaacattaaagtggtaacaggaggctgcaccttgaaaagccactcatgccttgtctgttgtggtagctacctggttatgaaacattttctaatccagagagctttggcctgatttataattttaggatgttttagaccttgatggtgttaaactttcttcttcggaagttatgtgcattgatattgagtgcttttctaccattttccttcctcaccttgaaataagcgagctattcatgcccttctgaagagggagagaggctacgcatggttgttgaagacacatggctttgttgttagaatacatcacttttcactggatatacctgagagagaggctaggcagcatctaattactgggagtttttatatgtgaagacaagaattaactgactccctggcctccttttcacatactatgtcccccaatttgctaagttaccattttcagtgaatgccctgctatccttccagtgcccaaggcagagagaggtacagttataattctgaggtcttctcttttctctcccactgcgtccccacacacagtcaatcaattaccaaatatttcttttccatgtaatctcctggagttcttcccatctctccttctactatcctagtctaaatcccattatttcttgttaaattatatgataatgtcctggttgtccttgtcttgtcttcctatgccacatcatctctctagtaagaagaaaaacatttaattctataagctgcaaaaatggagttaatataacatagtagttaaggatatgggccctgtagccagaatgtctggatttgaatcctgactccattgctttggcaaaagcagttatgtaaatgttggtaaatctctaagcctcagtatgtgtttaaaaaaaaattaaaacttttctgattggattgttgtgaggattgaatggcataaacatttagcatagagcttgacacatagcaagcaccgaaacatcactacaacaccaataatcataaatgcaaagctgagtattccgctttcctttggtgctttttttcttttcttttttttttttggagacagaatctcactttgttgcccaggctggagtacagtggggtgatctcagctcactgcaacctccatttcccaggttcaagggattatcatgcctcagcctccccagtaactgggaccataggtgtgtgccaccacagccagctaatctttgtatttttagcagagatgaggttttgccatgttggccaggctggtctcgagctcctgacctcaggtgatctgcccacctcggcctcctgaagtgttgggattacagacatgagccaccgcatctggcctccagttttctaattaagaccttttaacctcatcacttctaggacaaagccaagatctctttggcatgccatggacatcccagctcccctcttctgttccttctgtcagcgctcttgtccagagaagtgtccatctcaaccgcttccactgccccaagtggtccatgctttcatgcacattctttgccgtttgactggagcatcctctcactgcaagtctggaaattgcctttctgccttctaaacaccaaccactccttctctttatgtaggtgactcccactcatcctttcttacctcatgtatcagttattccagaaagctgtccctgataccctagggctctcaaggagcatctgaatgtattcttcattgcacttgccaaactattgtgcaaccgtggactcacttgtctgtatgttctgtctcactataataagcctttgagtatagagtctggatcatgtttgcttttcttgtacccagctcttggcatttttattcagttaacatttgtttaatatattaataaatcactacccaattggggatttgttttatggagtttcattatgcctagtgcataagaggcacctcatgaatatttgttaaatgaggatgcatggctatttaaacttttgtgtatccttacttggcaactcttatatggatacactgaatatttaaagaaatttaaagttatttaattctaagtcctgaaattctaaattctaacaaattgttaagttaacttatgtaaataagttagatgatttagcaaagttgtacaatttttttttttgtcaaaaataggtatggttatgaaacagtgagctggatttgcccttctgactcataaaatatctctgaaggcagtatatttgaagctgcttcagatgattcaaaggtctagcagataacttctaatctcaaagaatgaatagactgggaaaaaaaaacactcaagtaatgttgtgccaaaacaccctatctctagccataaaatcatacattcatcagttttcttcagttatctcaattttctttttgtctgaacacagtgagataagaattggcttattatgcactccacaaagaaaattatagaattttctgagaggaacattagaggccagttaggccaatcctgtgtatatgagccgttctgttgcaagtgatagattgcttaagcaaatggtggaggtatttgttcttctcatgtaattggctcttgtattctaggagcagcatggtggtttccaaatactatttattgtataaatgaaaataagacttatttggagaaatggctgattccagagctacagcagtgaaaatgtgagatggacctgggacaacttgatataagaaagcaatgaaacaaatattattgtaattattaattatgttgaaaggaaacatgaaccaatttgaagggactcccagtggccaaacgtgggacaatatgagcattaaaaaaataatgatggcaattgattattacaaaaatagaaaaaaagggaggtcaggggaagctttttttctgttttttgacaaaagaatactagcgtgtaagtaagaaaagaatgatagagttagaaaaatcactattttaaagtctcatatggaataattaaagcaaggatgatcaaggaatactaatcccattgtgaaaaattattgggaaataggacagccacatggtaccacatcttcacccctgggttacttactgctataaaggggggacatgtacctttacagtagagagatgtggcagtaaccatcttaactaaatgattgagtttagcctcagtaatgatgggacaccctaacattttgtgtcttctgatgtgatgaaatatgaagttcacagtatgaagtacttttatcagaactgtttaatttgaatctagatttagctttcagttcacaggaaatacaagtgaaagaataataggtttaatgataccatgaagaaacaaccaaacaaatgcagaatttaggacattttgtaagacaaccagcctggactcttcaaaaagtcaatgtcattaaagaagaataaaggcaaaagtatttttagattaaaagatactgactaaaagataaaactgccaaatgcagtgggtaaaacatgactggatcctagtactaaaagtgggcaattgaggaaatttgaatatggaatggatattagataatatgaaattattgttaattttcttagatataatggtattgttgatctgtaggaaaaatgtccttattcctgggagttgcaggtagagtcagagtatttaggagtcaagtgttatctgtaattcattttcaaatagctgaacataatacatttataaatatataaagggtataggtgcaaaagcatatatggcactatgttgcaattgttgcatgtagatggaatgttcattgtattctttcaacttttgttctgaaattcaaaaaaataaaataaataaactggaaaaaaaatcagtttggtaaaagcaaagcaaaagtcctggagtggactgctggcaggctggcagcctcacttcctctattcctcagctctgttcctatatgtgcacagagccacacacttgtgagcattgagtgaagtgtgagcctagtgaataacactaggctcgcactagactcagcactaatttagtcaaattttggagcagtgggaaaatctcctgataaatttaacagagaagcttgaggaagagctttgtcttgttcatttttaacatttccagtatgtgtaatgttgtaggaattcaaaaactgaaaaatacataaataaaggggtgaccaaatttgaggattgcctggaaaagtgagagtatataagtgactttcaaattcagtaaatatttgtggaatttagtagatctgaactagttaagggacaagtaagtttaagatgaattccagaagtaaggggaaggcctctttttaaatcttctgtgcatgcaatatttcatattgttttaacttttagtaataatacttgcttttctgaattagtgatcaaagcactttatggaagtcttctgcagctttccctacaggtggggaaagtttgagtttggtgggaaatcttcagagcgtggtgtgtgcaattatgctttgttccttggtgagctatgagtcaggcacttaattatgtaaacgatattgcaagagagcagttgcataatccccaagagagtaattattatctgtcttggtagaatacaaggcttttaatctgtaaataagcaattctatgtggaagagctacatgcagagtgattctgtgtcttaaaggtctcttatgaattttttaaagtgaaagcagtaactgcatgtgctgattacctgctgcctttgtgtttcaaagggtttatgatgcttcccttgtggttttaatccctcctgaaatatttaagcctctgagaatgattcccgtgaagggtaaagtgtgtctaagttaagcctatgaataatccaaatgtttcaaatgtattaatagatgaagtaaaaaaagatatgctttctgcaaattaaaaaaacaaaccaagataaacaaaacaatgaattaagacattggcaacacttttaaaaaagcaaagatacaataattagctaatacgttgctcactttttgatggttagtaggtttttttccatttttttaaactttattttggtataacttacatataataaaatgcatctatttaaagttttcacatgtatatttttaaaaaaatatgtgccactgcagttagggtatgtgtgtattttgcttaggtggatctgagtcttttagacactgaaagcaaattttaacttttgtttttttaagtagtcagtagtgtctgccttccctcctatctccctgttatagtgtggatgagttgaccatgctcttctctaaggtcagctgctgcacttaaacacttgatctctccccacttcacctaatcaggactacatttggggaactgtccttctctgctttgttaccagctttcccctctctatcaggttattcccatcaaaacagaaacatgtctcgacatcttctgctgtttcttaaaactcttgaccatttctctgttctcctctgcagcaaaactcaggagtctatattctgtcttcacttccttttctctctttgtctctgaaaccaactccaagaggcctttcatcccactcctccatatagagcctgcttttgtcaaggtacccgtgactttcacactgccagaatccatgggcagtgttgaccaatccgttggtctaaatcctatttggccgtctgcagcatctgatatagtttttcactcccttcatctagaaacacattctttacttggcttcaggaaaaccctatctcctggttttcctacttcctaactggtcactcttactaagactcctttgtgagctcctcctcttttcctgatcctttaaagtttcctggctcaggtactctcctcttctttgctctattccacagtcatttcagccagtgtcatggttaacagtcctctgtacactaaagactcccatatttctgtctgaagtacacacctatcccctggactccacacttattggatgactaataggcctctcagatttaacacagtcaaaaagtgaccacactctggtcttcccacagttgtctctcacctgggttattgcaagagccttatgtctggttttcctgcctccaccctagctccggcccctttcactctatattcagcacaacaggccaaaaagacctttttaaaccatcagattatgtcctccttttggccaaggcctccaatgacctcccatatcagtcagagtaaaaactgtcccataaagatcttcatcatctgaccccactagctttccatctttcctccttttccccccattactcactctgccttgctgcactgacccctttctcagacacgctcagaggcctctatgtcagggccttggtatggaacacttctttagtctgggctgttgtgtgctacggttctccatggcttgctccttttgcacctcagatctctgctccaccatcctcttctctgtgagaccttctctaaccatcctgtttaagttcccccacccagccccaccaactctcctgatccctcctccaggttttatttttctctattgcacttaccaccatatgaaagtaaaaatacttgcttatttgtgtttgttgctttgtctgttttgtctgtcttttcatattagaatgtaagtttcatgagggtagaaattgccttggtcacagctgtatcacctgtgcctgagagagactgcaggctcggtcagtactgctgaatgagtaattgaaaagcaacttcaaaggctgcttgatgctttcttgtcatttttagagcagtcttgagtgttacagagggtggatagcattcagaataattaactttatgctaacagctcttttccattcctcagtttctctgtttgaagaacataaggacatttctcacggcctgttgtgagacgtttggaatgaggaaaagtgaacttttcgaggcatttgacttgtttgatgttcgtgactttggaaaggtaattatacttcatttttaacactactttttaactggaaagcatttaagcaaattgtttcaaatcttgaagtagggcatgtgacttaagtggtttatgtatctgcattatatagttaaatttcacatgtagatggcttagcaaaaccaaaaaccaaaaaacaacaacaaaaaagaaaccccacacatacaacaacaacaccaaaaaattagcatcaactttccaaatgagattagaattattttgtaattaaaatagtatacagggagggaatcttttctccagagataattttttttctgctggtcacctcagaggttagggttactattatctgccctttaggttgatcactgggcactcaggcctgaggaccagtattcttttcctccagtcttctctatatctgaaagctgctaatttttggaagttgagaatgttctgttgtccttttctctattttgatacttggttgggtgactcagagaagacatgaatcacaagtgttcaagattgttgaataatttctgttgcttgaatttcagcagatatttgttggatttcaaggacatttttcacatggaaattgttttaatatttactgttatccgtatgcacactaaacacatgtataataagtgaaacaaatcatcatttcaaaaattatggtcatttattatgaagtgagtggacataaacctctcacaagtaactagccataaaagagtcaggtaattaaggtgacaggactttagcttatgctgatgtaattgcattatgaaaataagcaaataaggaggaaaaaactaatgctattgagaagtttgtccttattcttgtaattcaggtgctagtatcttatcaaaaggctgtttgagagtatacattgttttaactctgagatataatattttcattagaaaataaccaatggattgctctttgctaaacagcataaacttgagacagaaatataggaaatttgatgctgaaatacagcgcatatggggaagccactctacctggggtgggggaaggccctggttctctctccggtcttaacccatggtcattttgtgatctagaaggcaccagccttctcaggcatcaggctgcctgccagcttggaaagctgtacaaaaggaaggggggataagaaggtggtttctaagattcctttaatctctggaaagctgtgatttaactgtcttgaggtccaaaaagtgatggaggataaaagatgataatttgtacaacgaactgaaagccaagcccctagtaaggaaatgggagcgcatttgtctgtggccatgaatcacaggtgaggtggacacttctctaagctgttggccctgaaaaacaccagagatatttctggttttatttttcttttatccttccgcctgttcctcctgcacctttaaaaaaatcttccttgatttttctttattttcaccctctcttttggggaaatgaaaaatgaaaatgaattggggaaatgaaaaatgaaaaagtcttgactttttaaagctcattaaggaactatttatttttcatttaagtttgcaagaaatggtgttgataaatgttggaaaaatatataaatactttaaaatgcatggtggtgttctactggaatgagattgcatgctagattgattagacaacggaagctttgtaggagagttgatactacaaaaaattgaatgtgaaagcataaactgtatgcttctcaaggataaatgtatttttgactgcttaaaatattttagcagtggtagatctgaaacagaattaaacatgagattgtggtttagaacttgaacctacattatagtcacttacattttgctactgccaagattggagtagctatctctttagaactgtatgatctaaagaaaacactgaaagttaaagaatttgtgatatagcttcataatttaccagtactaatagtattaagcattatatactctaagtaaaaactgccaataccaccagtagttgaacacttaaaatatgcagtctgttcagtcttcatgtataatttgtaaaattgtaacaacgttaagaggttaggtactacatttttctcttctgcatcccaaatcacatatctatttgagattgaagcagcagtttgaactcaggtctagctgattgtccactactgtaccatagtgcaaacattcacatagcacataacgtgtactttgcatatattgagggaatcagcgcatcaatcccaacatgtggatactattatttttcccatttataggtcctagcttgtgggtaatggaactgaaataattcttgtagttttaagttgaaaaaatgtgaatagtgttaattcagaaacaaaataatttctgatgtcgtgaatatatacattttaacaggatgtggataggttgttttcctccattccgtaggatttaattaaatgttctgttaacttaaaatgaataatatctatgtgtgctctcctgtctgcctcatttcctacattggtgaatctggaattcatgtgtatttggcatctttttgccaaagaatgtattaattatgatagcagcacctagtgtttttatagcctttgaagttttcagagtgcttaatattactgacttcatttgattgtcataatactcttgtgaagacattcttcagatgaggaagctaagacatggggaggtgcttggatagtgattctagggtctccttgcttgggaagaggaacaagatctggagctcaggcctctggcttctcagtcctgtttttcttgtccactgtctgtgttttgggtctcactgctctgtggatggtcagggaaaaggatgaacttatagaagaaaattaaaggaatttataaaattaaaaaacacaggtgatgtgttacttggcatctacttatactttagaaagaaaggaaagatttaggatactgcatgagtctgcagcccagtggtggttaaagttgtttactctaaataggcatgtgattcactgattgtacacatgcagtcaattcttagctatactctcttaccccttttctcattgtggtgttttctgctcactaaactttgtccaagctctccctctgtttggggtttaggagatttattttgaatcttaggcttgatatggatgtgttttcttttggaaaatcctggaaacagtgttaacacaaatgataatttgtattttgtgagatggtgaagagcatctatttgggcttctctagaagggcttatgataattctgcctttcagtgctacctttattcttagaattgagctctttcctcagtagtaattcacttcaaactccaccaacatcaacaaaaattagaacagtttgaaacgctttctacacttttttttttaatcacacaggaaagaggagtgagtttagtaacttgaactcatttaagagtcagcagaggccttcaggttagatatgactctcactcttcagggttgttaaatactgaaaaaagctcctgaaagagggagatttcttttctaagactgctgaggtctggtggggggagagggggggaatgggggacgttgagggtttatgttttgaaaaaccatttactttcttacttttgaaaaaagatgaatctctttctggctttctgataataaaaataagtaaaatcttgttagttaacttctttgcttaagaaatgtaattaaaatgtttcccctggcataatattagaaattactatattattttttgacatcatgacagtatctgtaactttgttcgtttccgtactgtatgtaaagaattttccataactgtttcaatcgtcagtttatgattaactcactctttggaaatgtttcctactgagctgtctgttggcacattgacagtgcagaagcacatgggattttttctttaatgagacaatttctagagcgtaatagaagtcaggctgccactgtccagatgagtgactaaagtcatctccttaccctgcctctgggtgagtgtgaagggcctgcttcccatgacacacagtgtaaagtgatatgttttcttaaagagtatccatacctggccagtggtaggtccagttgatttgaattgcaataggatagtttcatcatgttcaggttcaggacaggcaccgtcaaaaggaattcagagcatcagcttaggggtgagtcagggatacaggtaagaacattattgggagagagagagagaaagagttgtattttagttaagaattaaactaaagagcttcttcacagcaaaatgaacagtcagcagagaaaacagacaacccacagagtaggagaaattcttcacaatctatacaccaaacaaaggactaatatcaagaatctacaaggaactcaaattagcaagaaaaataaaacaaacagtcccatcaaaaagtgggctaaggacatgaatagacaattctcaaaagaagacatacaaatggccaacaaacatatgaaaaaatgttcaatatcactaatgatcagggaaatgcaaatcaaaaccacaatggaataccaccttactcctgcaagaatggccataattaagaaaccaaaaaataataaatgttgacatggatgcagtgatcagggaacacttctacgctgctggtgggaatgtaaactagtacaaccactatagaaaacagtgtggaaattccttaaagaactaaatgtagaactaccatttgatccagcagtcccactactgggtatctacccagaggaaaataagttattatacgaaaaagatacttgcacacccatgtttatagcagcacaattcacaattgcaaaaatgtggaatcagcccaaatgcccgtcaatcaatgtggataaagaaattgtatatatgacggaatactactcagccatacaaaggaatgaattaatggcatttgcagcaacctggatggaactggagactattattctaagtgaagtaactcaagaagggaaaatcaaacattgtgtgttctcactcatatgtgggagctaagctatgaggatgcaaatgaataagaatgatacagtggacttgggactcaggggaaagtgtgaaaaggaggtgagggataaaagactgcaaattgggtttagtgtatactgctcgggtgattggtgcaccaaaatctcagatcaccactaaataacttactcatgtaaccaaataccacctgttcccacagaacctatgtaaataaaaaattgaaaaacaaaacaatacatggtttctgagttagatcttggtttggattccagttaagctccctattagtatacagtcttgggcaagtaacttgacttctttgagcttcagtttcctcatccatgtattgagtttaggtgagtattaaatgaaattgtgtatgtcaagtgcttaacagagtgtcaaggtccaaggtaagtactcttattgttaatgttattatcactattattatttttaatgattgtgggattcattggtaaacataggtgtcgaattttgaattaagtgcaagagaactaatgatattaaaagggtgagataagaaataaaattcattctttctaatgttgtatagcactattttattttattttgcacagccatcgtttctctttccttctgtggccttggatctcctttgagaaaccacactttcctctttcttaattacagagtttggatggtttcatcaattatatcccatgcctttgaccacatagtgatggttcaggaatggggttagtcactcagttgggaccaataagacatttgcaagggtagttttatttttctctcttcctgatacagaagagtgtagatgtgagtctacacaaggagctataaccatctgggtaccacatggagtttcaaaatggacccagttcagagggaatagagttgaagatgaacctagtgacaccctgtgaagtgggaatcagtgctgtgcccaaagctaaatgtatatctataggtttttccatgaaccaatacattcctccttttctcttttttgagccagttttcactagttctttcaaccaagagtaagagaaatctaagtgattcactgtgtttcaccagttaaatgatttcaggtttgtagatgtgttaatctttattaccgaagttccaagcaatttggagaccatttgttaagcctctacatctcctatcgtatatgcaagaggagatataaagacaaagtcccagaacctattttgcagcatgtaaataataaaatagaagtacagtcccagcttcatagtcaatgctttcttttccttgccagtgattccagaaatatcatcgatcttgaggtttagaaggtcaccacaggcatcccgacaacctacttgagagcctgcaatggtttactactacctgtctatctttgtgaaattctgcctggctttccctgtcacaagaaaaccctcccaagcaaaggcttctgagcctttcttggctataggtggccccagggacctcaccttggcatggcttgaaagagccttattatctagtgcatacacgttaatcaacacctgaaaacattttttcatatatacatatgtaaacaggaagaattattttagggtgtaaatctttttaggtacttgtttgacataaaacacgtttgatgtttctctcttgaagtatttcccactcaaattatccagaaatctttgggctttatgtcatccatgggacttaaatcagccttgcttcaaagccccacaggagcttgatctctctgtctgctagtgtggtgctattgcacaagactggttctgtgtggttcctgggacagctttagtgctctgatgctagcaatgcccttgtattttcagcccttctcaaccccatactacccacacaagtttccttcatccctatagcattttagcttttgcattgagcctggccaggccatatctccctaactttgtgatgaattcttttcaggggctccttgtattctgtcagcaagcctgggtcacatcctcctcattcagcccttacagggtaccaacttccagtctcagagcggcatttgggatcctgagtatttttcctccctcaagggtctggaattttcccacaaattagccagcttccagcctagagctggctcagcctggcaaggagtactgtcaggagtcaacctccactcaccaaggccgcgtttgctttgtccccctgagcagtaggaggcttgcctgtaattacataactaagggggagctctgcagtgattcctccctgaacaaagatagcttgttccaaggctacctttttttaggcaaaggaggagggaacagcttctagccttccctaatgtatgtgtctggctggctgttaacacaattcccagatcattagcactattgccctcctttgtttttggatggagttgacctgtttaacaaccttctcatctttttcccttttgtaggggtatttaatgcttggcagatttttccattcctacctcctcttatagaactttagtacccgagccatgcaaacacattttttacaccttagtgattattcaagtccagtttttagtctgctcctaattatttttgagtcagttcaataaactctttactcttctgtaaactaaagactgttgaaaacttctggaataatatttcccaaataactttgcaaagaatcccattgtcctaagaaatgttaataggaagactggagaaaaatattcttgttccaatgagtttggtaaacactgcatattgtatttatgagatatagcatagtaaaggaactgaaaagtcctgcagtgaggaaaacaaacttttgtttactccagaatttctcatatttgcacatgatattaggtatttagatatcatgctatttaggtatcacacaattgcttcaaactcattatgtataaaactgaagtacttttttttttcctttggagacatttctattttggtaatgtttcttgttttgttcaccctgccaggagctaaatggttacaaatgccctattttttttttttttttttttttttttgagatggagtctcgctcttttgcccaggctggagtacagtgacacaatctcggctcaatgcagcctccaccttccaggttcaagtgattctcctgcctcagcctcccgagtagctggggctgcaagtgtgcaccatcatgcctgggtaattttttgtattttttagtagagatggggtttcgccatgttggcccagctggtcttgcttgaactcctgacctcaggtgatccacccgcctctccctcccaaactgctgggattataggcatgagacaccatgccaagccaaaatgccttttctttaaccctccttgcttttgcctttagttgaggtactcatcactgggattattgaaattgtcttctaggtgttttcttgccatcagttttgaatcgtttcaagctcatcttcaacataatcttccaaaaatgtagatctgatcattttactcatgggtttatcaccaggggaaggtatctgagttaccagtggcgaatctgtacaggtctacaggaatctcaattcttgcctcctcagaagaaagaattcgactgaggggcataaggcagaaaaagagaccgaggcaaatttcagagcaggagtggaagtttattttaaaagcctttagaacaggaaagaaaggaaagtatgcttggaagagacccaagcagacactgaggtcaagtgcagtgtttaaccttgatcctaggactttagaagctggcccctttcccatgattcttcctttagggtgggttgcctgcaagcccagtaccctccttatccttgggaagtgagcacacacagtgtgtttagtatgttgtatgcatgcctatctgagactttttccctttttctggtggagtgcccctggaaactcatactctgccattttgtctcttactgtgtactcccaggaaattgcttatctctggtgcctgcattcagttaacactttagtgcaacaggtgtggaccatcaggaagtggcttttcccttgcatcagctgccaagttatcacttttagagaggcagtgtgataattgccaaaccttcacctgacagtcctagtggctgggagaaccctttcctgtccactcttgcctatctaactagctgtaacaggtttaaaacttgatagtggatccctgttgtttataagagaataacatctaaactcttttacaagccgcacaagattcttcatgatcaggcctctgcctacctttctaaccttatttctcactttcctactcccataaactccctcgcttaagtccttccaaattataaatcatcatgactcaccagattaatattgattaatattgtttcctttgcctggaatgccttttcttttcattccctttagtcccttgtctgcggtgactcaattcaagatcacatacactcattacactcatacacacactgcttaaaatctgaaattatgtgctttatccagagctctggacttagttggttcttggatatattgagtcttctgggcctggctttgctacttgtctctgcacattccctcagtttcaactgggaccttccccctgcttctctgccccacagaaattggaccttgacacattacattggctcttttcttcagctcatcctgagactttgagatcaagtaaaactgactttcaccctaccctgcccccagccacctgtgtgcaggaaagttgctcagcctctcagagccttcatgttttgatctgtaaaatggccctgatgaggatccctactgcatggaattgtggtgaagagtgtgaattgaattctgagggaaaagcaaccagtgcagtgtggggcagggggtaaggctcagccagaggtaactcctgagtaattcacccatcatttactcattgggaagtatttgtatgccatgtgctcgtttatcagggtggaggagcaggtagtcaagaccccctgctctcaaggcactgtcactgtccatcactatccaagttaaggaaacaaattggtaaagcataaacaaacaagataattacaaccagtgataagtgccactgaggaaagaaacagagaacaatgatgagcagctggaggaagccactttagacagactgggaaggaaacccatttgaaatagtgacagcccagtgagaaggggatgctagtactcacacatttacttatttatttattattttttgagacagggtttcaccctccatgcctaggctggagtgcagtggtgcagtcttggctcactgcaacctccttctctctgactgaagcaatccttccacctcagcctcccgagtagctgggactacaggtgcatgccaccacagccagctaatttttgcatttttttgtagagacagggttttgccatgttgcccagactggcctcaaactcttgagctcaagtgatccacccacctcagcctcccaaagtgcttggattataggcatgagccaccacgactggcccttgccctcttatttaaattaagttttatataagttataaagcacattttaactagattctatcctacctctttcagtagatccccttgggctactccttcaacttggcctcagtttgttcaactctgatattctcctgattctaaaatgccacttattggtagatgtaatatgtatacattgcattttgtaaagtaatgttttgctttgatgattcttagttgtgtaatcctctctgaaaacatcaaggcttaggctctctcataccttttgtttatatataagctcttctgcagaggcttttaaacctgggtatacttcatttttggtaatattgacattcccttaaaattttaaacttttagagagaaaacttgactgtacatacacttctggagagagaaaggcattataaagagctaaaagcatgataaagatatcacctagattttacgtctgcatttggcatagctactgagaatgtttccaaaactggaaatctggtttgagaactgaaatcaaacttctctttgctgtttcaaggattcctctatagatcaaacagtgaatctttcgggtagttttttaaaaaaactctatttccttcctaatatacatgtaaatatgcacacagaggtttacagacataccaagatatacgtatctatatacgtaagtagagggaaagttatttaggaaggtgccgaagtggtaatccacatggaatttttggatttcgctgatagtcctcacagcttgagtgtaagatgcaacaggggcaagctggatcttgaggtccagcagagattggggccagagtatgagggcccttgagatcttgcagggtctgcactgattctgacaaagggccagtgagtactttttaacagatagacaggagatgaccatagacaggagatgacctgctaagtgcttgagctaagcattctgtcagtgggggaggctgtagtggataattgtaatgccagtggtaggaggagcagacttgaaactgaggcagtctggttaaaaaatgatgcagacctttactagagcaactgtaaaagaggcccagagtttgagagatttgggatgtttaagaattgaagtgagtggtcagaggatgagaagagagaatagtgagccttggaaacctggcgaggggaaaagtagggtttattgcaagggaaataatggagcaagagcaaatataacttacagtgggtttcaaattaatgtaggagaattctaatggcatttacccttaatttatgtatattttacaaccgagtagatatgttttatttttctatgatttttgctatattgtgccatcctaaattttccctttgttcctttttttgatgttcagttggttgcttggttgggtttttttggtatttactgattatctagtggaagcttggtccctggtagaacacttagaaatttggggtttatcatttctattaaaaatggaaaatattttctttctgtgtaataggaaaccttctaggaatatttgtctgtatttccaaggctatggcacatatatgctcactaatgcacgtattctaattcctagccttagttgttgggccgtatcctatctgagctgtgttcagaaatccttgaccttgtcacattggcttaagggtaagatgtagtttatccaagttacatatggaggtcattgagtcttcatttgcttacaataaattgtaaatatgatggatgagaaatatgtaaggagaattggttaattccagtgggtgatatattaatagtcaatttacttgtctacacaaacaacagtgaggcagaactcttggcctttgactgttgtgcctgtgtatttcctatcaacaagatctcctagaaaaggaggatggcactttccatgtttattttctgtgtcttcttttttttaatggcttatgcacatctgtaggaataaaggaggctggtgtttgcttcccatgctcagtgagaggggtagtgtgggggtggaactggctgaatgctctcatttgcacaggattaggcagaggaagtgtgcaccagtagtggtatgagcaccaaacaactacaggaaacaatgcttggcagtcactgcagctgtgtggagtccggctgcgcaggcttcctctggatagagtttagtttctgagtcacttgttttccacttaaagcacctgtgtctttggagaactccattgaagaaatattagttgaatatgggcctttctctggtttgcctcaatgccaattataatgctctttggacatgaaaagttctgctaaatcaacatagtgtctgaggaccagtggtgtcaggacaggccagtgcgtagagcagtcagaaatcattaggttagaaaaatgaatggtttttaaatctttcagaacactccccactgaagtatgtatgcatgtgtatacacaattaattttgcacagagatgtgcttggtgaccttaggtataggctttaccttgctactctcattctttgtttctgtgtagaggaaatgaaggatgctgcttgctgcttctgagtaagcaggtgccttatagattgtgtgctgaatcatttacactctttgagttgtcttttaaagtagctgcatatttataattcatcttagacaagatgatcaatctagaatggttatattcggatatgggtggacactggacactatttttattggtcagtctaggtcaaattttaatgatgattgatagcattggatatggattgggtagagtaataaaaacatacatagaaggctagattcatgttagaattagctatgcatctgctccttatatctataaagtttaacaaggattctttaccaaaatcactgctgatttttcctaatagccttaggcttttgggaagaagcagcagaaaaattagaatttattggctgccagatgataaagtacagtttcttggggagatagcaatttagaattttagcaaagttactatgaagtataatgatgaaagggagatgatattaattagcgttggcttttacaaaaaaattgttgaagtatttttagctttgtttacttggaatttggtcagttgactgcacccaagattctccaaatacatagacgtgtagaaagataagcaatcaaaagcatatattcctttttttctatactgttttggattcatggttggaatcccttctgcagtatttgaacaattcctagagatgtaacagaaatttcttaagtagcaacagttccaattatggatccagttatggataatgaattatctagagattcatcactaataataaagcataatctatctttctaaattttcttccattggttttagagcagcacagaattaatttctacaccttctgtaggacaatcgttcaaatatttgaagattgttatgtttctgtaagtcttttcttctttgttgtcttctttttttgtaaaagatagggtctcactgtgttgcccaggctggactcaaagtcctgggcacaagcagtccttgtgcctcagcctcctgagtagccgggactgcaagtgcacgccactgtgcttggcttctcttcttaaaatgaaataaacgtcgtctcctcagttctttcttttttgattatttctttctaacttctgtgggtaatttgaaatgtctgattaggataacacatatgaaacagcacagttaaaggttaagaaatttaaaatcgaaggagagaatagaagccatttaaagaaagggacactatcatcataccaagtggtttgaggattacagtgatctctcagcagccctgaagtcaagtaaaaaagaaacccaataggttaatacagaaatgagttcatgaactagcttaaagcctttgttcccagtggtaatttggaaaatgctaaattaaaagcccaagaacttaaattattatagagataaccaaacatataaaacctagaaaactactacaatcaccgctcatatatctactattgaaaaattatcatttctgtctctacaaaaaaatacaaaaattagccaggtgtggtgccatgcatgtgtagtcccaggtacttggaagattgaggtaggaggatggcttgagtcaagaatgtggaggctgcagtgagtcgagatcatgccactgcattctcgcctgggtgatagagtgagactccctgtcaaaaacaaaaactaacatttgaccatatttgattcatctactatctattataaatacttatataccgctatttttgctgaacaatttaaaagtaaatatagataggcatcatgacatttgtcccctaaatacttcaaatggtacagccgtcaaaataaggatatttttctatataaccataatatctttatcacatataacaaagtgaataatacttccctggtattatttaatatccagatatttaaaatatcaaattttactagttttctccacaatggattttatagctagtttctttgaatttgacatgattgaataaaggttcagacattacttttggttgtcatgtcttcatgagtctaagaaaaatgttttctttagcagttttataaatatcttgatttgaatttaattttctgatgatctaccaaaggtgattatcatttttgatgtatttatattgaatttatactgctcctctttgagtttgaataaagctttagttttctgtaatttaggggatttttaaaagccttggcttgcattcagtgtggaagggactcagtaaatatttttgttaagatttaaataagtagtataatgttaaacagtttacaagtattttaggactattatcagctaagcactaaatcagtcatcgagaattattccatgtttttatgcagagtttaaatacaaggaatgtactcttttagataaatagatcctaaagcatgttttctaatcaagaaatgtctcaaggggctaggtgtgctggctcaacgtctataatcttagcactttgggaaacagagggtggagaatcactggagccccaggagttcaagaccagcctgggtaacatagtgaggtttcatctctacaaaaaataaaataatgaactgggcttggtggtgtgcaccagtagtcccagctattcaggaggctgaggtgggaggaggtcaaggttgcagtgagctgtgatggtgccactctactccagcctgagtgacacaacaagactctgtctccaaaaaccaaaaaatgaaaaaaaaaaaaaaactcctcaagaatctttcagagttttggagtcttagttgcttgaatgctaagatttttatctggctaaacaacaacaaaaaagagaaaacaaaaacacccaaaccccaaattatttagacagtatttaagccatttacactttgtcaaaaatgttagaattctgatttatccctgcctaaaacaactgtatagtttcaagaacatttgaagaatgagatgtcatattcttgcccatgggatttcatttctatggagcatttacccaaatatttgctgtgactcacacttccaggatactctcatctagagcatcagtccccaaccttttaggtaccagggactggtttcatggaagaaaatttttccatggaccgagtactgggggaatggtttgggggtgaaaccgttccacttcagatcatcagacattagattcttacaaggagtgcacaacctagttccctcgcttgcacagttcacagtaggcttcatgcttctatgagaatcgaatgcccttgctgatctgactctaggcagagctcaggcagtaatgctcactcacgcactgctcacctcctgctgtgtaccagactggtactggtctgggggttggggacctctgttctagaagtttcactcctttttaaaattttcttagatggtatctgacttaaatttttcttagattttggttctaagaaatataatagttaaaatttcaaaagcaatagttttgaaggaaggtttagaagagaagaaactgtttttagaaaatcttgtataatttcagtgctgtcaatatgttaatctcaaaatgaagatcacatttttaatcttagccctctaatagcaaagaaatgggaagaaagcaaggaaattttcttgtagttaagtggattttcctcctttagtttaaattctggtggtggtatatctttaagagtggttaactcacttaagagtgaaaagaattccctaaactcaaaaagtataaaatgtataagcatattctttattacatttattattgccagagtggttgtagtttgttcaggattaacattttctttacctatgttgttactatatattacttgttacataaataaaatctgcaccaaagttgggtcttataaataatataacatttgtatcctctttttaatgaaaaatttcccatgtagtccatatacctttcttccacattttttctctctcgaactccagctgatctaaaaggaatctaggaagcattcttcattcaacctttaagaggcccagcaaagtcttttggtaaagttgacaattctttttctgagacaggaatcaggcacagtcagtcgataacttccccccctttcattctgcattcattctgaatattttatgacaaaagcttttagttttgttacagaaaaaaaatacaaagcccagatttgtccaaaagaacatacccgcaagaaggtctacggcagtgaaacagaaattgaaaagagttgaaatggaatttttttccatgtttcatatcctccattgttcctaaacctgtaccattcattgtcatggaaaatgttactacagtctaaaaagttataacaaagttcaaaatttatagttaacttaggatttttaataagaatagaatatatatcatatatatgagaatttattaggtagttttaattcacaccaccacaaggtcccacaataggctgtctgcaagctgaggagcaaggaagctagtctgaatgccaaagctgaaaagcttggagtctgatgtttgagggcaggaagcatccagcatgggagaaagatgtgggcaagaggctaagccagtgtagccttttcgtgtttttctgcctgctttatatcctggccatgctggcagctgattagttggtgcccacccagattaagggtaggtctgcctttcccagcccactgagtcaaatgttaaccttctttggcaacaccctcacagacacacccatgaggaaaactttgcatccttcaatccaatcacattgatattcagtattaaccatcacaccatgtcatccacagtggagtgaaatggtgcaatcctaactcactgtaacctcaaactcttgggctcaagcgaccctcctgcctcagcctgccaagtaactaggactataggcacacacaacaccacacccagctaattttaaaagtttttgtagagatgaggtctcaccatgtagctcaggttggtcttgaactcctgtgctcaagtgatcctccagcctccgcctcccaaagtgctgggattacaggtgtgagccaccatgcctggccttccttcatacttagaaattgcatgaatcattagatttttgtagtaaaaaacaaaaatctcatatttgctctattagataggtttcagccaattttcgagaagctggttactaaacaagagaattaaacttgagaacaaaataaagtgctatcaattagttatcataactttgataggcaatttaaattaactattataacagtaatgttgattttttttttaatatttcggtcctgggggaaaagtaccatttaaaatttcatgtgtcttttgatcagtaaatcagcatattggatagaaatttcagctatctactcataaaaaatgttatattctggtttgactttggctcaaatcagaaaattgctatgtaaaaatttacagaataatgcaatatcctctactcaatagctcccaactactaagaatattataaatgtaagcagttttcaggaacatagcaatgtgggatatttcactggaatgatgtaaaccgtaattaatcacatttctgtgactgccatcagtaccatcaccttccttcagtgtctctccttgtatttgggaatcccagatttcatgtcggcttttgagtagtcctgctgctgaccataggcttttctctcatcttgcttctcacccactccacctgtgtcacagtgtcatttgtgagcttgcttatgagtgtgcatggggtggtctcctactcagaacatgcccagctgtgcttctgttgcttcctagctgcctctgcagcttctgtgagggaagactgttgggcaccaatggtagtgaagcctttggacctcaagcactgcactgttttctgggtagaagtggaaggagcctgtgctctcagctttctccacacattttcctttctctggactcagcaggtatttttctagagttgacacaaaggaagagctgtgagacatcttcctgtatcttgcctttgagtcctcttttattccccctggctgctttgttattaggctgaattttttttcattaggttttgtagtcctcatactattagatttattgtgggtcaccctaccagtcctaacaaggacatcagtcatgtttgaaactcatagatttggggtaagctccagttgttacacaattcctgcccctgctcttaacaaatttaacatataaatgaagttaacaggcctggtggggtggctcacacctgtaatcttagcactttgggaggcccagtcctgttgatcccttgagctcaggagctagagaccagcctgggcaacatggcaaaaccacatctctacaaaaaaatacaaaaattatctgtgcatggtggcatgcagctgtagttgcagctactcaggaggctgaggtgggaggatcgcttgaatccaggaagttgaggccgcagtgagccatgattgtgccactgcactttagcctgggtgacagagcaagactctgtctcaaaaaaataaaataaaataaatagagttaaataccagagatttcttgaagagccttttttgtgacagacagtagaatgctgttcaccaaacccatttcttcttgttttggggtacataggcagattatatttccaagcctccttgcagttagacttagccatgtgaccaagttttagccagtggattgtgtgcagcagtaatgtgtaccattcccagacctggcccataaaaacattcgatgtgctatcttccatgcttttgtttttgtgtgttttctctaaacaccaactgagtacagaggttttggctttagaagatggcaaaggcacaaagggatggatgctcggtcgctatgtaggggaaagtcatctgctaagcaggaacaccattgtgggattattatgtgaatgaaattaaactttagcatgttaaaatacagaattttagggtttgttacagcagttactgttatgctttcacatcatttttcagcagttctcaacctttttcaccttcacatacctgagagaagagaccctcccatcatattcgtgattcactatggcagggaaagatagtctcaaggtcagggaggtcattatgacatactgcaaaagtggtcgagcaggaaaattgcagagaaatgtcattagatttagcaacatctagagcactgttaaacaatttcagtagagtggaagtagcaggagatgagattgcagaagcatgagaaataaatggtagatgaacacatggagtcagtgaatgaagttatctaatatattagattccatcaacataatcataagattgcaaaatttgtggaaaacaagggaattgttttttgttgaagccatttgttaaaagattttaaggtgaagatcttcagcaaggtagtaataaggtaaatatgtatctgtttgcccagggtggtgtcggcttatgtctgttaacctagcataattttattttattttatttttttaggcagagtcttgctctgttgcccaagttggaatgcagtggtacaatctcggctaactgcaacctctgcctcccaggttcaagtgattctcatgtcccatcctccagagtaactgggattacaggcgcacgctaccatgcctggctaatttttgtattttttagcagagatggggatttgccatgttggccaggctggcctcgaacccctggcctcaagttatctgctggtgtcagcctcccaaagtggtgggattacaggcgtgagctgccatgcctggcccctagcataattattcatagtgacctttcactcttagcaatatcccaacttagaaaaaaaaaatacagttaccctacactgtgacaacctaatcggcatacacagggggttcagatctgaaagagtggctgttaaacacatagaaagttagctcataaataagttgtctgtggaatattctttagttacctcttataaaggagttaaaatactgtttcttggtttacttaaggacattgtcaaattagccctaatataggattgtgtttaggaaatagaatgttggataaccttcattgatctgggttctcttttgatctatttttgtttctctggcttttctctttctgtgatggtctttctgtgtcctgctttgtcatcaaaaataacttttttttttaaagacattaaaagaacttgcagcactataaatgaattttttttttttggttcttgagggatgggggaggatctttctgagtatagaaacaagaacttgtacagaaggtgatacattttcatttatgaaaatggaaaacttgtgtatctcaaaaagtacccccaagtaaaaggcacatatggcaaactctgacaaaacacatattatttatggaaaatatagtgttgaaagttttattctccataaagggtaaataatggattacaatggaaaacacttgtctcctatgttgcagcatagatgattgcatttaatattcccagctccattctgttattatcttggtttcacagatgatggttaggtaacttgccatagccacatgactaataagtggtagagaagggattttgaacccatggggtcggattccagagcacgagctcttaactgctgctctcctagatcaatacataaatggaaaactcaaaagaagaatgctcaaaaaacagttttcacccacatccatgtgcacatacttgcatacacttattaatatgagtgaccagtaaacatgctttcaaacctgttggaaatgatggcaaaaatcaatacaaattaaaaaaaaaacctacaagccttcatttttgtctattagataggcaaatcttttctttcctatgaaaatactgagaattgataaaggtggtgtgaaatgttggtgatcctatcctttgaatagcatttgcctggtgaaatgcactcttttagatagagtggttgctgataaaccatttttggttaggatttgtcatggtctatctaaaatcttaaaattgtttatggtctttgacctagtaaatatacttttaagacattaataaaaataaatattcagagagtcttacatacttaagataccagttgatatacataatgttaatttaataatttggaataaaaactaacaaccattcaatagaagaaagttggttaaatgagttttcagaacttcataaaatggagaactctgcagccatttaaatattttagaagaaaaatggaatgaaataaatcctcacaattaatgaaaagtatctaataaaacagtatgtaaaccatgatccccagttttattaagattatatatgtaagcctggaaggaagcttgccaaaatgttaactgtgtttgtttttcagtggctagatttgaggtggtttttattccttttctattttacaaatttttgtatgcaatgactttgtcttccttaattggagactcattttcttttaaaaatacttaagactttgaagagtcctttaggaacatacctgagtcttcaaattatttttttggaaggttgagaattatgcatagagaggaacagggaaactaaaaagggaatttcatcatcctcataagggaaaaatatatagtcccattgaaaacgtttattaaaggtataggtacagtcttagttccattttaataaacaattcaaacttctagtagtcattcctctggcctcagttgcttagcaccagaatccttagttggaggtatgataacttaattgtacctctgaacatagcctttccaggaatcagttctgcctcaatgaggattacagattaaaagcaatctcactgtattgtacttgaaattgagaattatgtttccattttattgtatctagtaaaacctgaaactcttgaaaaacttttttaaaaaaatcagcaaactcgtaaaatagcatcagttactgtattttctcaaatataaacaaggcgctatactgaatcgatcacaaatttttctaagtgggtagattcatatatttgctgaaacacatttagctgatgctgcctaatggtgacattagatgcatcttaaaaaatcttctctattatatgtttatttccagcaacatcctgatttggcaagaattatttttcagagcctgttccctttggggacagcatcctgtgggagcacttctgtttccctttgacttcctgtgtatttaaagagctcttaacaagtgtagggtatgtggtgacttttttatcttgcaaataaatatgaaaatcttgttctgtggctcagtataaaatgaataaaggctttccagcttaataggcaagaacatttaagattaaaggtaaaatgaaaataaaatgaaaattcactattgaaacaaaaatttgcttttttttttttttttttctgagtgtttttctagttcaagtatgctgggtgttagcagccaaattaaaactgaatagatatgacagtgacccttttataacacatttgtttaaggccagatgatacagatgatgacaaatgcttgtaagccaagtgatagctcttctcctttccctcttctcatgagtccccttcctctagctttgggaatgagggccggcttctttttttttttttttttttgagacggagtctcactctttctcccaagctggactgcagtggcgctatcccggctcactgcaagctccggagggccggcttctttgttcatgtggcagttgcttctctgcacttcttctcagctctgtcttgttcccagccttaccttgggcccctgctgctctttctgcttattgccacctagaattcaggataacttttcttccttcaagttctgttgctgtggagggcaatgccaagggcacacttacctgtactgttgcttggtttcccactatgcagccatacgaaaggaaatatatatatatatgtgtggtagcctttattagatgtttgcagataatagggaggaatgacaattaggaagagaaaccttaaaaatagttgatcagtctggctctacaaattaaaaggaagaaaactttattttttctttcttttttttaaaaaaattatactttaagttctgggatacatgtgcagaatgtgcaggtttgttacataggtatacatgtgccatggtggtttgcttcaccaatcaacccatcatctacactaggtacttctcctaatgcaatccctccccttgccccccacccctcgacaggccctgatgtgtgatgttcccctccctgtgcccatctgttctcactgttcagctcacatttataagtgagaacatgccatgtttgtttatctgttcctgtgttagtttgctgataatgatggtttccagcttcaaccatgtccctgcaaaggacatgaactcattcttttttatgggtgcacagtatcccatggtgtatatgtgccacattttctttatccagtctatcattgatgggcatttaggttggtttgaagtctttgctattgtgaatagtgctgcaataaacatacgtgggcatgtgtctttatagtagaatgatttataatcctttgggtatatacccagtaatgggattgctgggtcaaatggtatttctagttctagatccttgaggaattgccacactgtcttccacattagttgaacctaatttacactcccaccaatggtgtaaaagtgttcctatttctccatatcctctccagcatctgttgtttcctgactttttaatgattgccattctaactggcatgagatggtatctcatggttttgatctgaatttctctaatgaccagtgatgatcagcttttcttcatatgtgtgttggccacataaatgtcttcttttgagaagtgtctgttcatatcctttgcacactttttgatggggttgtttgtttgttttttcttgtaaatgtgtttaagttccttgtagattctggatattagccctttgtcagatggatagattgcaaaaattttctcctattctgtaggttgcctgttcactctgttgatagtttcttttgctgtgtagaagatctttaattagatcccatgtgtcaattttgtcttttgttgccattgcttttggtgttatagtcatgaagtctttgcctctgcctgtgtcctgagtggtattgcctaggttttctactagggtttttatggttttaggtcttatgtttaagtctttaatccatcttaatttttgtataaggtataaggaaggggtccagtttcagtgttctgcatatggttagccagttttcccaacaccatttattaaatagggaatcctttccccattgtttttttttgttaggtttgtcaaagatcagatggctgtagatgtgtggtgttatttctgaggcctctattctgttccattggtcaatatatctgttttggtatcagtaccatgctgttttggttactgtagccttgtagtatagtttgaagtcaggtagtgtgatgcttccagctttgttctttttgcctaggattgtcttggctatgcagacttttttttttttttggttgcatatgaaatttaaagtagttttttctaattctgtgaagaaagtcaatggtagcttaataggggtagcattgaatctacaaattactttgggcggtatggccattttcacgatattgattctttctatccatgagcatgggatgttcttccatttgtttgtgtcctcttttatttcgttgagcagaggtttgtagttctccttgaagaggtccttcacatcccttgtaagttggattcctaggtattttattctctttgtagcaattgtgaatggaagttcacttatgatttgtctctctgtttgtctgattggtgtataggaatgtttatgatttttgcacattgattttgtatcctgagactttgttaaagttgcttatcaccttaaggagattttggactgagacgatggaattttctaaatatacgatcatatcatctgcaaacagagacaatttgacttcctctcttcctatttgaatgccctttatttctttatctttcctgattgccctgtccaggacttccaatattgctttgaataggagtggtgagagagggcatccttgtcttgtgctgattttcaaagggaatgcttccaggttttgcccattcagtatgatattggctgtgggtttgtcataaatacctcttattattttgcgatatgttccatcagtacctactttattgagagtttttgaggtgttgaattttatcaaaggccttttctacatctattgagataatcatgtggttggttgttttgtcattggttctgtttatgtgatggattatgtttattgattttcatatgttgaaccagccttgcatcccagggatgaaactgacttgatcgtgatggacaagctttttcatgtgctgctggattcagtttgccactatttttttttttttttttttgagacggagtcttgctctgttgcccaggttggagtgcagtggcatgatcttggctcactgcaagctccgcctccagggttcacgccattctcctgcctaagcctcccaattagctgggactacaggcacctgccaccatgcccaactaattttttgtgtttttagtagagacagggtttcaccgtgttagccaggatggtcttgatctcctcaccttgcaattcaccctcctcagcctcccaaagtgctggcattacagacgtgagacaccacacctggctggtttgccagtattttattgaggatttttgcattgatgttcatcagagatattggcctgaagttttctgttttttgttgtgtctctgccaggtgttggtatcaggactggcctcaaaatgagttaggaggagtctctctttttctattatttggaatagcttcagaatgaatggtacaaactcctctttgtacctctggtagaattcagctgtgaatctctctggtcctgggctttttttagttggtcagctattaattactgcctcagtttcagaacttgttattggtctatgcagggatttgaattattcctggtttagtcttgggagggtgtatgtttccagaaatttacccatttcttcttcattttctagtttatttgcgtagaggtgtttatagtattctctgatggtagtttgtatttctgtggaatcagtggtgatatcccctttatcattttttattatgtctatttgattcttctctcttttcatctttattagtgtggctagcggtctattttgttaatcttttcaaaaaaccagctcctggattcactgatttttttgaagggttttttgtatctctatctccttcatttctgctctgatcttagttatttcttgccttctgctagcttttgaatttctttgctcttgcttctctagttcttttaaccgtgatattagggtggcgattttagatctttcccactttctcctgtgggcatttagtgctataaatttccttctcaacactgctttagctgtgtcccagagattctggcacattgtttctttgttcttattggtttcaaagaacttatttattttggccttaatttcgttatttacccagtagtcgttcaggagcaggttgtttggtttccttgtagtcgtgtggttttgagtgagtttcttaatcctgagtcctgatttgagtgcactgtggtctgagagactgttttttatgatttccattattttacatttgctgaggagtgttttacttccaattatgtggtcaatttagaataagtgcaatgtggtgctgagaagattatatattctgttgattatagggtggagagttctgtagatgtctattaggtccagttggtccagagctgattttaagtcctgaatatccttgttaattttctgtttcgttgatctgtctaatattgacagtggggtgttaaagtctcccactattattgtgtgggagtctaagtctctctgtaggtctctaaggacttgctttatgaatctgggtgctcctgtattgggtacatatatatttagggtagttagctcttgttgcatttatccctttaccattatgtaatgcccttttttgtcttttttgatctttgttggtttaaagtctgttttgtcagagactcagagactaggattgcaaccgctcctttatttttggtttccatttgtttggtaaatattcctccatccctttattttgagcctatgtgtgtctttgcatgtgagatgggtctcctgaatacagcacaccaatgggtcttgactctttatccaatttgccagtctgtgtcttttaattggggcatttagtccatttgcatttaaggttaatattgttatgtgtaaatttgatcctgtcattatgcagtttcttcacagtgttgatggtctttacaatttggtatgtttttgcagtggctggtactggcttttcctttccgtatttagtccttccttcaggagctcttggaaggcaggcctggtggtgataaaatctctcagcatttgcttgtttgtaaaggattttgtttctcctttgcttatgaagcttagtttggctggatatgaaattctggttgaaaattcttttctttaagaatgttgaatattggcccccactctcttctggtttctagagtttctgcagagagatccactgttagtctgatgggcttccctttgtgggtaacctgacctttctctctgactgcccttaacattttttccttcatttctgccttggggatctgataattatttgtcttggggttgctcttctcgtggagtatcttagtggtattgtctgtatttcctgaatttgaatgttggcctgtgttgctagtttggggaagttctcctggataatatcctgaagtgtggttttgaacttggttccattctccctgtcactttcaggtacaccaatcaaatgtaggtttggtcttttcacgtagtttcatatttgttggagtctttgtttgttccttttcattcttttttctctaatcttgtgttcatgctttatttcattaagttgatcttcaatctctgatatcctttcttctgtttgatctatttggctgttgatacttgtgtatgcttcatgaagttctcgtgctgtgtttttcagctttatcaggtcgtttatgttcttctcaaaactggttattcttgttagcaattcctctaactttttaaaagtttcttagcttccttgcatttggttataacatacttctttagttcgcaggagttttttattacccaccttctgaagcctacttctgtcaattcgtcaaactcattctctttccagttttgttcccttgctggcaaggagttgtgatcctttggaggatgagaggcattctggtttttggtattttcagcctttttgtgctggtttttcctcatctttgtggatttatctacctttgatctttgatgttggtgatctttgaatggggtttttgtgtggacgtccttttcgttgatgttgacgctattcctttctgtttgttagttttctttctcacagtcaggcctctctgctgcaggtctggctggaggtctactccagattctgtttgcctgggtatcaccagtggatgctgcagaagagcaaagattgctgcctgttcctttctctggaagcttcgtcccagaggggcacccaccagatgccagccggagctctccagtaagaggtgtctgtcgacccctgctgggaggtgtctcccactcaggaggcacaggggtcagggacccacttgaggaggcagtctgtcccttagcagagctcaaacgctgtgctgagagatctaccactctcttcagagccagcaggcaggaagctttaagtctgctgaagctgcgtccacagctgcaccttcccccaggtgctctgtcccagggagatgggagttttatctataagcccctgactttgggggctgcctttctttcagaggatgccctccacagacaggaggaatctagagaggaagtgtggttacaggggctttgctgagctgtggtgggctccacccagtccgaacttcctggaggctttgtttatactgtgaggggaaaactgcctactcaagcctccctcccccaccaagctggagcatcccaggtcgacttcagactgctgtgctggcaaggagaatttcaagccagtggatcttagcttatggggctccatgggcaggggatctgatgagcaagaccactcggcttcctggcttcagccccctttccaggagagtgaatgtttccgtctcgctggtgttccaggaaccactggggtacggaaaaaaaacttctgcagctaactcagtgtctgcccaaatggccacccagttttgtgcttgaaacccagggccctggtggtgtaggcaccagatggaatctcctgttctttgggttgcgaagatagtgggaaaaacatagtatctgggccggatagcaccgtccctcgtggcacagtccctcaaggcttcccttggctaggggagggagttccctgacctcttgcacttcctgggtgaggaatgccccaccctgcttctgcttgccctcggtgggctgtacccactgtctaagcagccccaatgaaatgagctgggtacctcagttagaaatgcagaaatcacccgccttctgcattggtttcactggttgctgcagactggaactgttcctattcagccatcttgcccagaatccaggaagaaaactttaaaagttaaagtctcttataggttagttaaagttatgtcttatataagatagtttcatcatgaatacttctcagtttccagttttgtttctttgtcatgaagttcattctcttctcccttttccaggaagaatcatcttctttgaacccccacagtggaaagctccccgctctgtaggggtacgttttatcctaggattatctgtcacaactgaacaggcaaaagactcccccaaaaatgcatttttccgtgtctgattttatcagtctggaataaccccatggggggagagggtgaaaaaacttggtgcagacagtgtgggatgaagtttggctttctatgttccagccccttctgaatattcctcggtaatgtggaggtttaaatacgcctgctcatacttcagcagatggctagtgaattgaaccaccttcctcatatatatatatataaatatatatatatacacacacacacacgcacacatacatttttaatctcaacagtgtaattctaagacaaaagtctatagatgattagtgaacatttagagttgtgatagaaatccaatttgagctaccactagaactgataataactaatgtttattaactatatatatatatatatatatatatttgtgttgtgctaagggcttcacatatctagtcaaattctaatgacaattttattagtaggtactcttatcatccttattttatatatacaaaaactgaagcaccaaaggtttataggaaacttactcaggatgtgtgtttaagagtcaggatttaaatccaagtagcctgattccagagctgtcagttataatgcccacccaggagcattatgccttaggttgagcataatgtggagaatttgactcataggtttcacgataaattggaacagccaaactattgggaagggcggagtaaaggtggacttcaggaacaagtggaaccaggaattcaaatagcattctctctgtctgtcttttttctctacttttttctcagtaggtctgcttctgctctcatcatagataaagttcctcatgataggaatatgaacacttgatgttaatatttccatattaatgaaattaaccatcattaatttccatattatgttaatatttctctcattggagagactgtttcttagctatggttataaaaatcgggagaaatttctagacagataacgatatctgcctaagtctgtgccccctcccaaaatatcctacatatgatagagaacaagaagaaaaattaaaatgcgtaaaaatgacaccccctgcataaccagaaaaccaaggacacccaaacttcaaattaactaagttttaaaaaaaagaagaatgaaatctcattgagctatctctcataccttgcctcaaacctttgctgtgaacaagaacagtttaaaaagctgcatgggagagaaaagagatgccaaagattaaagtgaaactactgccacagaagttcaccagatgggtggaagtaccgaaacaatttccagtttggctcacaaaggcccaactatacactgtttataagagacacacctgaaacaaaatgattcagaggtactaaaaatcagtgggaaggactgcagttgcctcaccttgagtcagctgttcactcctgggccactcaactgtggccaacagtgcagagtgctttttatttttagctattcatctcgcaactcccttcccttgccattcagctatgtccaaggtagtggactcattttagaatttgggaactaaatgtttaaagcaatgtcttaaagaagaggggttccacactcagaagagggaggtactaggtagacaatataagtatgaaggtaaacatttgctagaaattgtttttcagtattctctttaatattcttattaaattgatttttgtttttgagtaatttggggcatgagcaatggtagtatagaaaaatttattactaggtagtgaaactagaataatgctgtctaatagaaatatgagagccataaatgcaagccatgtaattttaaattttctagttgctacatttaaaaagtgaaaaattaattttaataatacattttatttaacccaacgcaccccaattatcatttaaacatgtaatcaatacacaaagtataatgagatattttctgttttttttccttattcttccaaacccagtttgtatttacacttacagcacatagcaatttagactagcctcatttcaagtgtctaaagtgatggacagctcagacctagagagaggaacagtcatttagtcattttagcataataaatgaaaaataatacttgaatcctaaaatgtgttttatttctacttcccatcgcagttaaagtgtgccctatctaatgcttttactttgtgtttttgtatgttaatgatacctattttaaattggggcatgtttatagcttgatctatggcacccacaagcagtgatggagtggagaaagattgttttctcacctcctttagatctctgtttaaatatccttgttatagatgccttttctgaacatttgaaacaaaatagcaaccgctactgtttctcctcagccttctgacaatttctgtgccctttatattgctttagtttttttccccatatttcttattacagctgatataccatttatacttttaaaattgtttctttttctacccccccctttcccctaaatacaccagaatatgaactttgttgaggacaagaactttgtgctgtattcactgctatgttaccatatcctagaacagtactgcacatagaagatgcttagtattttctgagtgtatgaatgaatgaatttaagaccatatggcattcactattggtgtatataatggaactcccatcatcattcccctgagtggtctccctttggtactggccaactctgccctaccacactgctgtcagtcagcttaaacctcagttcttctagctaagaccatggcagtagtctcattgtggtctcactgcctccagccttcccgtataagctatttgattgccagatgaattttttttttttttaaaagcatctctgaacatgttgatcccttgctcagagttttcacttccttccagtggtttatagttcttcacacttgcttttaggagtctctgaaatatgctgtacttatatcttggtctgttgccaactagacagtttgccttttatttttaaaatgctttcagtgctttctcctcttcttttcctttgtatcaactactttttgttcctagtcactttttttcctttcctgccttgaccagaacccctgacttaacttttgttgcttcctttacgtttctttagggcacgttaagaacgttaactttgagcacttcctgatggattgatcatagaaaggctgtgaaatatgaatagacaatgaaatgtcatcaaagcaagacccttggcatgtgtgccaatggttaaatgctctggaatggagcatttgtggctgagagggaaatgtttatatctgttaaagtgcagggactgtctagaataaggcactttattaatgaacatcctttgataacctattcctttactaccttgtctttaagtggtgccaatcaagaaaggtctttgcacaactttaaaatatacatgttgttttgtagcaagtaaaaagtgacctaaatgctttctagcatattgaagcaccaactttttatgtattgaatttaaagcagtgatttacactgctaacactgtaacatttacaacatttacaacattacatttacaacattacaacatttacaggctaacagcaaaacatttacaagtttctatagagaactttaggaagtattctttctattttctggaagaaattgtggattatattttccttgaacgtttggtagaattcactagtgaaaccatctgggcttgatgttttcttttggaaggttattaattattaattcgacttctttagctgatacaggtctgttggtattatctatttctcctgtgtgagtttgtgtctttcaaggaattggcctgtttcacctaagttatcaaatttgtgggcatagtgttgttcattgtattcccttgttatcgtttcagtgtccatggaattagtagtaatgatctctcctttatttctgatattagcaatttgtgtcatctttcttttttcttggtttgcttagctggaagtttatcagttttattgatcttttcaaagaaccatcttttggttttattggttcctcctattgtttacctgtttccaattttgttgattcctgctctaatttttagtatttcttttattctgtctgctctaagcttaagttgttctttctctagtttcctagggtggaagctttagattattaattttagatattttttctggtttaatatatgcatttaatgctataaatttttctctaaggaccaatttttgctgcatctcatgcatttagacaacttgtagcttgattttcatgtagttaaaatatttcaaagttcatttgtgaatttttcgactcataagttacttgagtgtgttctttaattaacagatatctagacattttctagctatctttctgttgttgatttctagtttagttccatattgtctgagaacatactttatatgatttctattctgttaaggtatgttttattcagtaattatttttataataaaataggttatcagttttgtatttggtcataagcttgaagaagacaaagtcagtttacatgatgaattaaatcagcctctgccctataaagctgagcaaattggcaagaaatgctaacttatgcatttgactactacagtattcttttaatttttccttttctttcaaacttttattttagatttgggggtacatgtgcaggtttgttacagaggtatattgtgtgataccaagatttagagtacaaaggaatctgtcacccaggtagtgagcatagtactcaataggtagtttttcagcccttgcctctctcctctccttgctctagtagtcctcagtgcctattgttcccatctttatgtccacatatacctcatgtttagctcctacttgtaagtgagaacatgcattatttgattttctgtttctgtgttagttcacctaggctaatacgctccagcaccatctatgctgctgcaaaggacatgattttattctttttattttagggctgcacagtatcccatggtgtacaatttcttatctggtctaccgttgttgggcacttgggttgatttcatgtctttgctattgtgaatagtgctgcaatgaatgtacggatgcatgtgtctctaggtagaatgatttattttcctttggttgtatacccagtaattggattgctggattgaatggtagttcaacttgactctttagttctttgagaaatctccaaactgctctccacagtggctgggctagtttgcatttccatcaacagtgtaaaagtgttctcttttctccacagccttgccaacatttgttattttttgtctttttaataaaagccaccctgaccagatgtgagtttgtatctcattctggttttgatgtgcatttctctgattagtgatgttgaacatttatgtttgttggagacttgtgtgttctcttttgagaagggtctgttcatgtcctttgctcacttttcaatggagttcctgttttgtgcttgatttatttaagttcctgatagcttctggctattagagctttgtcggatgcatagtttgcgaatatattcttcttgattcatttaagttcctgatagattctggttattagaactttgtcggatgcatagtttgcgaatatattcttccattctgtagtttgtttactctgttgatagtttctcctactgtgcagaagctctttaggttaattaggtcctatttgtcaatttctgtttttgtcacaattgcttttgagaacttgaccatgaattatttgccaggtcccatgttgagaagagtatttcctaggttttcttctaggatttttacagtttgaggtcttacatttaagtcttcaatccatctcgagttgatttttgtatatggtgataggtaggagtccagttccattctcctgtgtatggctagccagtaatgccagtaccatttattgaaaagggattctttcccccttttctgattttcactgactttgtcaaagatcagatagttgtaggtgtgcagctttatttattggttctgtattctgtttcattggtctatgtgtcactttttgtatcagtaccatgctgttttggttactgtagccttgtagtgtagtttcaagttgggtaatgtgatgcctttggctttgttccttttgcttaagattgctttggctatttgggctcttttttggttccatatgaatttcagggtagtttttatctaattctgtgaaaaatgacattgctagtttgataggagtagtgttgaatctgtaaattgctttggacagtatggccattttaatgatactgatttttccaatcaggaaatgttccttcaatgcctagtctattgagagtttttatcataaaaggatgttagattttattcaaagtttttttctgtgtctattgagatgatcgtatggtttttgattttagttctatttatgtggtgaatcacatttattgatttgcatatgttgaaccaacattgcatcccaggaataaggcctccttcatcatggtaaactaactttttgatgtgcttctagagttggtttgctagtattttgttaaggatttctgcatctatattcatcagggatatcagcttgaagttttgtttcgttttgtttttttttgcccattgtttctctgccaggttttggtattaggatgatgctggctttgtagagtcagttagggaggagtccttcctctttgattttttgggaacagcttcagcaggactggtaccagtttttctttgtacatcaggaagaatttggctgtgaatccacctgtttttttttgttggtaggtttcttattactgattcaatttcagaatgtgttactgatctgttcaggttttcaatttctttctggttcaatcttggaggttgtgttattctaggagtttatatatttcctctagcttttctaatttgtatgcatagaggtattcataatagtctgaggttcttttatgttttggtaggatcagtggtaatgtcatctgccatttttgatcatgcttatctgtatcttttctgtttttgttcatctagacagtggtctaacaatcttatttattctttcaaagaaccaacttttgtttttgttgactttttagatgtgtatttgcatctcagtttcatttagttcttcgctgattttatttcttttcttctgctagttttgagcttgttttgttcttgtttttccagttcctgtaggtgcagtgttagattgttaatttgagaacttttaaactttttgatgtaggcatttagtgctataaactttcctcttaaaactactctcattatatcccaagtattttggtatgttgtaattctgtttcattaatttcaaagattttttgatttccaccttcattttgttgtttaccttaaaatcattcaggagtaagttgtttgaatttattgagacttgctttatggctaaacatatggtcaatcttagattatgttttgtgtgtagatgagaagattgtatattctgtgattgttgggttgagtattctgtcaatgtctattaggtccaatttgtcaagtgttaagtttaagtccataatttctttgttaggtttctgcctcgatgatctgtctaatgctgtcagtggagtgttgacatctttcactattattttgtgcctgtcttttcgtgggtctctaaaaacttgttttatgaatctggatgctccagtgttaggtgtatatatatttaggcaccatgcctgtgtttccctagccctaaggaatgtcctaatgggctgtgcttccccttcccttaggggcagcctgagctgaaggttagattgccagaaacctgcagaattccggaggtctgctggtcctctgtgcttggcacagtcagaatgggttgtggagtatgtccataggtggtctgttgatgtaagaggtcaagggtgggggatctttgggcagagcagtgatgctgtggctgtgcagatggtatggtgcctatgggccggggttttttgccctgcagacagctgtggggacctccagcttgctctccattgactgatctccttctggtggctactgtagaatctgtccctacctgctagttttttcccaaactttctttgcccagatcattgggctgttaagtgttctaggccatgaggctacattgggcagaggctgcagctagcagatagaccacactgttcccagaccagccccgcagagggaggcatgcccagctctcacactggcccacaaaccgcacatctcactcttctcagtgttcagagtgggtgctctttccctgcttgaggaccagccatagatctcagcttgtcactcctgagccatctgctctaacctggggggttgccacaagcctgaggctttgtcctttagctgcttggcaccagctgtgctagggtagccatagtgctcctaggcctccaggaaagcactcatgtggggccatggcaaggcactgaggctgggtaatggaacctgtgcggtgtgcatgctcttgtgggagcagccaggcaggggccttgatagcggctggtggacaggggagcatgcagtacagatgtgccccagtcctgcagaaaatatagccctactctctcctggcctagcagtcagcaggggttacagctacttggaggaagatggagagccttgaatgatgggtgcttattagagcattttgctgtagctgccctatgtgtaaaacccctgggttccatgcaggctggagctctgtctctttctactctctggacagatgcccctgtcagttcagaagcctgtgggggtcatgggatctcctgtagctaggatcccagaggtccatggtgagagtaggttgtcccacagtcacttcactcacttcttccttaggagctgttcaaggccaggaactagtcctggcattcagcaaccccatgcagagttcccagcttccttcctcatcagccctggtgtttgcattgcctctctattgactctcattgctttctctccaaagatctgttcaaagtatgttggtttactcaatattttggtctctcttggtgggagaggggcttcctggctgcatctagttggccatcttgtccccattcctcccattaaggtatgttttgtggcctggaatgtggtctgtcatgatgactattccatgtgagcttgatcagaatgcgtattctgctattgtgtagagttatcaaataacttgatctaattgacagtactccagattgtcaattgaatattccaatttcctgtagttattttcctgtgtccttactgattttatgcaatggaacatttttaaaattcctgccttagagcactgcatggggcccagtggtttaagagttatgagagctaatcctgaagggggctaatttatgacttgacaacagcagagacattgggtactaaagacattcagaacaggtatatgtggttttggaataatttacgggtgtatcatgcatttatttccctttaagagatgtttcttctgtgtgtgtccataagggtgcaatttttaaatgtaaaatgggtttatatatggccacacaaaattgcataatgagaaaacaagaattatttacagcaaattgttgactgtagttaaaacacctggttctgctttacagttctctatagtttctaaatatcttaaagtgagtgaaagtgttttacttttgaaaaagaactaaaagtatgttatggtttattgagatctgatactgtctcatgtgagcaatgaacctaaggagtggacactgtgaacaaaattgcatgcgagtaagcattgccatggctagtgcttgattacttgtagtagtcaaggaagaacttgaatggaattattaattacgattcatgtaataattttagcaccatttttgaagccacccttgtcatccaagtgactccctagacctttgctagcttcacaataacaagaacatttcactattgcttggtggggttacagggagtgaaataggcactgaccacacgtcataaacacactgtataattgattcctgaatattcagaactcatcccttgaaaaagagtatgaacttttggaaaagataaacctagaatgttgtaggtaagtatagacatacataagtaaaaattagaaaaaaaaatttctaaaattttgttagtctcagttataagtgaaaaagtatagaagagagatttgaacaaatacgtgataatattttctttaaaaaggattggtctaacatcattttaaaattatgttatgaagatgacttctttcttaaaaccttatgaaccaacctctgttagcttcaaacttttcttctacagtttcctcacctttctcagccttcacagaatggaagagagttagggccttgagttatgttttggcttaagggaatgttgtggctgatctgatctatccagaccacgaaaactttcactgtgtcagtaataaagctgtttcactttcttatcatttgtgtatttactggagtagcagctttaatttccttcaataacttttcctttacattcactacttgtctaactggcacaagaggcctagtttttgacttgcctcagcttttgacatgccttcctcgctaagcttaatgtaaatgttaatgcttgatcttcataattattttatctttatgattttttgctatgattttctagttgcgaaaaaaatcatgtatttctcattagattttcactgttatatcaaactttttaaaacttttgatagtgaaaattccaagcacacaaaatagaatagtatggttctttgaatcatagacctttttctagcatgaatgcattcaattaacaatgtgtgtatgttatttgctcttcctaacttatgattcagcagtttacattttgtacaatgtaatcaatggcttacattttctacagcgttactgtttttaaaatttccatagcttaaatatgaatattgaagcatcaacactttggaaaacataaattaattgcaaggtagacacaaggggagccatttctaccgaggtgttaaagacacctattatactacatcctggatattagacagttggaagagttcataaattaaaaaataagctttagtaatttggagtttgtgttttaaattattttataaaagactcagatagaaatgaaaatgatgattttgaaaatgctgccatgaagaaatagaaggcagtcagtgggactgccttttggattgctgtgagactcgcaggtcattgttcagactgttaaagacccggtccacgaattccaaacattttcgaaggttcttcctgttcttatcattgtaactgctctgccgatgcatttgctgactctccaggcacctgcttgttcacagtgagtctatatgcttcctccggcattatatttagaagctgaaggagagagacatctttaattaccatcttctaatttccaagaggagagaactaaggtccattagtccattagatcattagcaacgtttccctggccatgtttgtgttgctcttataaccagatcagtccccatggctgccaagtccttgccatcccttcactgccacttccatggttacttgccagatgagactgactttacttcacacctggatgattgcatttgcttccaagctcatgctcatcttgttgttttaagtcaatcctgtgatccaattcagtaagttcttatgggttgaatagatgttgtaggcaaggctgtggtttaggttctgtatcagtgactggtcaagattcctcaaggagcttttccaaatgtggtgcaattttacatacctaatctcagcagaacctttctactgaattgtggaaaaaaattctggtttttactatggttacatgagaatatgtctaaaacgaatgtaaagctattaagtgtatattgagtctattatatactagcatgatgctgggagccagaatatcccaaaaatagaggtttaaaacataagctctgctctgaacaagtgtacattctcattgtggataaaatatactcataaatgtgcaaggaaggatatatccaaatactcaaatgagcaacatgaacaaaagggcagaaaatcaatggagagaaaactagttaagagattaaagatgaagtaaagcttgagatgaactattaaggttaaatatgaattgtgaggagagaaaagatcattccagagaataatattgggaataaacattgcaatatatatggaagaaaaatttctacttatttgaatttgcctgtaaaactatgcttatctttgctcattttgcatttccctgtcaattttgatagccttttcttttctgaaatgacacgaaaacagttttaattcactcagttccattaaccttgagttggtaatatcaaattggtattattgtatagagatatatgtcatatattattttaaagtattttccacatattttttcatgtattgtttataaaaacaatttaaaagactatactgaaaagtcctaatattcttttttttttaaactcacaaaacccgaaaatttttgctatcatttacctactgttttagcaagatcttattactggttgagcatctgaaatagaaaatctggaatctaaaacacttctggtcccaagcatttcagataagggatactcaacctgtagaagtatttgtggttattccccacatctgagctttacttatagtgagtgaagattttaagtggaagtcactatcacaagttttggaataatcagctagttttaaactaatacagatataacacgatatacaaattaaacttaatttttataagccagctgcggtggctcacacttgtaatcccagtactttgggatcctcccaaggtaggaggattgcttgaagccaggatttcaaggccagcctggtaacatagttgtcaccctgtgattgcctggggccagcattgcagatggtaaagaatttaccaagacaatcgtaggtaaagaaaggcagatttattagagaatgagcaaagatatgttggaagggtgtgacaggcagcacagcagagaaggggatgtctgcaaagaggcaggggctggagggatgttttatagggtcatgctggagggggctatgtgcagaatgaggtcatgctgctggggctacctgtgaagtgagaggtagttgtgccagcgggttgtttgtgataagttgtctctcagagcaattgttctcccccacctggaacccctacctcatttttgcttacttacattatcaggactccacaatagtgagacccatctctacaaaaaattttaaaacaaattggctgatcttggtggtccatgcctgtagtcccagcttctcaggaggctgaggcacgaggatctcttgaggccaggaactggaggctgtagtgggctatgattgcatcactgccctccaccctgggtgatagagcaagactttgtctcaaaaaaaaaaaaagtgtgtaattatgtcttattcactaaatagtgcatgatcttatgtgcatgagaaactcatagtttctagaacctgttttctggttctcagacttttctgacaatggcctttaaagcctgctgaattttaaaaggtgaaaggaacttttcttcaaaggggaatctaaatctttggttaaggagttttaagtagttttgctcattaacatggagtgcttctatatactgtttcacttaaatttagttctttaaatgaaataaaacttgtatatactgagtaaaatagcagatatcttatctctcggttgcttgtgggaaaaatcattccaaagggatgtatgaaaggctccttgtttgttctgattaaatgatatggagcaaatctgcgatctcttttgacattgaacatgttccataattaaaagcaatgtaagctagactgacattgtaaatattgtttttaagatttaaaaattgaagtttcacattttttagttctcatatatgcatttgagtttctaggtggatgtcttaggctaaagtaaataaagtcaactttgttaagctacttgtgactgcagctgccaaatgcccccattatgagaaaaaaaatactgtggttattttacaggaaatactgtacaggactgtggtctgtgcaaaggaagtgcccacacagaaactaaaatactgttagtacttaatggtgtactttatgcttgaagtaaaaatgagttggtataaataaactttaatctcctaggttttatgttcagaattaattctaatacactttaatgtagagcatggtaatgactttgtatttttacatggcttgctgacagaatgcagctaggagaggagcccacataaaagctatataaatcaggggaacagatggttgagggacaattgtttgactttaacaatatcatacagtgagtcaacccagatttaaaatacaatagtgctgtagtaagcagcactatcatcccctttcatttgctctggagactagcagtagatttgtaattgtcctattgtaattcttttcacaaatcatttagtttattttactaacatctctctgtgtaattggctcatcatggcaaatggaccaatttacatggctggaaaggaaagcagagtgtgcatgctgctttccagcatccgtaatttgttatgtgagaagcttcttgttagaattcttgacatttactcacctgcataaaatagggctgaaaggggctttgcaaatgatgtagttcagacttctcattttgcaggtgttatcacagaggtaagttgatgttttcaagattgatcatttgtagacaggataatggcctccctaagatgtccatatcttaaccttgaaactgatgaatatgttaccttacatggcaaaaaggactttgcagatgtgataaagacaaggaccttgagatgagtagattatcttggattatctgggtgggcccaatgtaatcatatgggtcctgaaaagcagagaaccttttccaactggcttggagagagatgctccactgcaggctttgaagatggaggaagagggctatgtgtccataatatctggattgtgggcagtctctggaaggtggaacaggcatagaaaagaattatccgatagaatctccagaaagggatactaccctgccaaccccgtgatttttgtaagtcaaaaattcaacatgcgtctcactggcttaagtgagatgcatgttgattttctgacttacagaaatataagataataagagttgatttaggccatacatttgtggtaatttgttacagcagtatagaaaactaatatactcactatgttagaggataagccaggcctagacctcaggccttctgccttacagcctaggtcttttttcaggtggtaagtgccctttatatcactgaatcttgtacgcttgaaaggcagaaacaacttgactcttcttcctcgatatttaacgcaagaacaggtaaagagagccacccagagagagctttttaactgatgtctgagcaccagatgttccagagaggagctaaatgccagaatgaatctcgctgtgtactatttagcccttcaaattcactcaccaaaactgtcttgattcaggagtatccagaatgctgcccagaatgcttagcaattttgtgactgcatgtcttggggtgtgttgagtctggtcttgactcccatgtcccagatcatctgtgggtggatgtatagttgataggcccttccaagtaattctcaagcctctagttggtctagaataggaattgaccattaactagtatgaaataaattcaagatactaataaaatattttagctcccatttgaattttgattctgacttctcataaggtcctttattaaaaattttaatcactcacagaaataagactgtttcaaataaaatcaatggttaaaaaacctcaaattggataaaagcaaggacataattcctcagaaaacctaatccaggaacttcagatatgtttgatgtcatctgccaatgctatttgttggtaatagctttctggaacattattggaaaggattctgtggccaggtccttgatcgagttaaatgagttctttgatcatgtctgacttgggcagctggggcaatgctaatctacttcctagagttttctctccttgtatcaatcaattgttaatcactgtttcttgggtgtgatatttcagccagttataaatccatctaaatgaactatatcccactcacatttcttcataggatctaggtgggagagatacaccctgatgagtgtgatgagagtttgaaaatgtgaagtacaaggaacagtgacctcatttgtaagttgttctttaaactcacacctggagaataaggaaggaagagggatttgagagaagggaagaactaagtgtcaaatagtgctgtcctttccattccttaatagtagtaagtagttctttcatgttacctctgtctggcttagtcacagaaaattttatttagctcagaggacccttgactgaatgtcgtcataggtagttcagggtagaaaacaggtagataaaactaaaaatacatgcatattaaaattttgtggagaagacaaaaaatacatgaaagaaagtatgagaaactattacagcatactaacttttaggtcattcatatttttttactaaatatttttataagatttatacagcaaatggtagatactattaaaatattatctttttaatataaaaaactgaaacaagtgataatatttagtgcttagatattaagctgtttatctgctttaaaaaatatagactcgggctgacattacaccctttattttccgtttgtttctttctttacattaatactggtttcagattctataagcaaaatcaatttgattactgcagacaggagttcgaagacttcaccttcgtagcctctgtaacagggccttttgtgagagcactttggctgtaatgatcagttgacctgtctgttgagtatcatgaagcttaagtgcctggaatagcccttgactttcgctaacattggaagttcatcagtttgccaactgtctgccagtgaactgcagtacactagagcagtaatgaaagtatgacctcataccttttgtggcaattttcattttttccaaaaacgacacttactttattgcattgagctctactgtgaactataatgcaggagggctcatattcttattatcgctgtttacaaatataaagctcaacttggaagggttgatgactccctaaggctagtaagcaatgaggtaaagagaaacaaatattcaaccttagaaatgtgagttataacttacagttaaataagaattttcaatcttacaggtttcaaatctgcatagcaagtagcgtaatggagcaaatgattcttttcctccagcttgcctattataacctaatcgtgtagatagggatttacaatatagtaaatgtgtagacaaatttacaacattgcaaggcagtatttggtaagtagtagaagttagtagatttagctccttaagttaaatctactaaccttaagacaataacaagataaacttgtacaagtggagaccttgttattgttgattccgcatttcattaagagtacatatgcctctctgtgcattctcatctattactgttgctgaaggggataaaggattataagaaatgattcctttcctccaggttgcctataacctaactgtatagatagggatttacaatatagtaaatgtgtagataaatttacaacattgtaaggcagtatttggtaagtgtcttgacagtgtcagacataataacctgatttgtccagataaatccaaaagtgagggtcagctttggcctgaataagcaggaagaaattcaagtaggaagtgacttttaagctgagctttgaaaggtgacagatttggataggcagatattttgtgagaggctattttattttgatggaaagcagaggattttatttgggcagaggcattggggtaggaaaggtcaaagcatttgcaggtaggggagtagaccagtttgacagaatatttatgtaggagagtggttataatcattacttcatatgggaatgagaaagtagtagatttttctctatcatgagcctgcctacatttccttcctcttaaatttgttaaggaggaataggcttaggcagtttttttttttcccgcgagggtactatctttgacattaatccaaatatttggtaaagggtaatcatatagattctcatttttgtttttatcttttttctctttgtttctgcattccatgattttattaaacaaattaaaacctgtagaaaaggtacaagcatatgcaataaagacccataagtgtgatgatacttgctacacagtcattttagaccaacctatctgtatgtggcagcccctgtttgcatataatctagatcaagggtcagcagacattctctgtaaaagataagaaaggaactattttaggcttgttcggccatatagtatctgctgcagctactcacatttattattgtggtagaaaggcagccatagacagcacataagtgagtgagcatggctttgttccaataaaactttatttacaaaatgttaagacagacttggaccacctgtggtagtttactgacttttagtttagagacatatgggatcacctcatttcgaataatgggaccctagatttcttaccttcttcagcatctgtgggttcttttactcttaaaatagtgttcctgttcttctatttcttttggttaatattgctttttatatttttatattatttctaattcttaataagattctgcatggggcctagtaaatcattgtgactaaccacttagttattactagtgattataaggaatacattatatatgtttatagttgagccatactaccttttacaattaatatattgaaatattttaactgaatttaacattcagttaaatgttttatttaactgaaaatgctgcatacataaaatgtcctcttgctggaagtacagatatagatagtgtatatgttccagtatttttaattaaggaacacctgtaggttgttttatttgtttggggttctgcttacttcctcagaaggctggccgtatttatctgtggatccttttcagtactgagcagaataccttgtacattggttctgaaaatgtacatgtcattatccatttgaacctccgtatggggccatcctcatcaatatacacatgtgttaatagtttccttcactgtaaaacaaacaaacaaacaaagaagttccttgcttccatattcccccgttagttatcaccttattctcatttccctttctcagaaaaatttcttgaaatagcgacgctatgtgcatcttcactttatcccatctcttttgtttttcagtctattccaatctggcatttgttcccatcaccacattacaattacttttatcaacatcactcatgaaatttatattctgtatactgggacacttctctaccctcatcttaatcagctgtttgccagttttctactcagttcacgtctccctgcttcttgaaaccttcttcctctgctgctttgcaatgacactggttgagtctgtttggactgccgtaacaaaataccacagttagagtgacttaaacaacaagaatttattttctcacagctctggaggctagaagtccatgatcaaggtgtttgcaaattggtttcttggagagctgtcttcctggcttgcagatagccacctcctcactatgtcttctcatgacctttcctcaatggatgggcattaacagggagcaagcaagctctctggcttctcttcttataaggacactaatcctgtcagatcagggcctcacccttatgacctcatttaaccttcattactttcttagaaagcccatctccaaatacaatggtactggggtttagggcttcaacataggagttttgtggagatacaaacatttggtccattaacagacagtctcgtgactttcctaccacctcactggccattcttctgtctctttgctcagcttttcttccactgcttgatctctaaaatttggagttccacaggctctattctaatctttattatttttttttaatgctacccagcccacgtggggagtctcagccattcccattgcttcacttatcatttctctacaggttctcccagattttaatctgcacagtaggtctcttccctaagtttcagactcacagtcaatgcacatctcatctgaactcaaatttagtaagtctaaaatggaacacttaatttcaaaattcatatatgtgcttcttccccatccttcattttagaaaatggaagaatcattatctgcagtttctaaaatcataaacctggacactattcttgattccctcatgtctgtcatcactgttgtaagcaagtttttctgattctgtcttcaagagtcatcttgaatttttccatcttcctccttctcctttggactttgaagcgctttctcatcgattggatagtgggtaaaatattacttttcttgtctcttcagcctaagtagcaactctgaatatccattcccacagtcttccctattatatcaacttgttttattgtcttcctagtattctctcatccaaaattttatggcctgtttatttgcttacttgtcttttgtctcttcctttgagaatgtaatattaacagaacaaggaagggtcttgttaacttcactcttcacatgtccatattacctagaaaagtgcctggtatgtagtaggtgttcaagacataattattatagaaggaatgaacctcttttgctactattttagttcatgccaacatcatcttttgcctggactattacagtaaccaagtacccccattttttcgaagagatcatttaattatttttttattatttatttatttatttatttatttatttattttttttgagatggagtctcgctgtctcccaggctggagtgcagtggcacgatctcggcttactgcaagctctacctcccaggttcatgccattctcctgcctcagcctcccaagtagctgggactacaggcacccgccaccttgcccggctgttttttttgtatttttaatagagacgggatttcaccatgttagccaggatggtctcgatctcctgacctcgtgatccgcctgccttggcctcccaaagtgctgagattacaggcatgagccaccgcgcccagcccatttaattatttttttttcccctcttttttctcattcctccagttccttacttcccacttatccctttggaaatgcaaatataaccctttgccttcccttcaccatacattccctacagggcaagttcttctaaccatgggctccaagattgatctctcttccagagttaacaatttacaaaccaaagcatgcccactgtggaactctcacccaccaggagttttgcctcaagagataacagtcaaaaagtatgcctgctgctctctcccacctggtgagtttttgccctagtcctgcccacaaaggcaccagcagtcaccagctcaaccagtcagtagataaggcactgaagctggcataaggaccccaatccccggcttcctcccctgcatgcaatttctctttaaaagtgcccactttctgctccaaaagcaaagcagtacacttaaaggcaggccacctgtacttcttcccctaagatagctttggaataaatcactttctttatacgagaccttgctcttgttaattggactctgcaagcggagagtgaggaaacctgcatttcggttacattactaactaatcaggtctccctttcctgctcttgccttcctgcaatctatttccatagagcagccaaagtatcctctaacagttcatctcacactgtgcactccccagctggaagcttgtctttggcttttccatgcatgtcctggcccctccaacctcctctgtcttccattttactgtggacgtgtcagctgtctaccagctcctagaacacgccacacactttctcccacctctgagtcatttactttgctggtgctcttcctggattgttcacgatcttcacatgactggccccttctctttgaaggttttatgtcacagtgtaaatgacacgtttttagagaggcttcttctatctgagttgggttttccctccttcattggcccagcaccaagaagaatttcttcacagaactattgtctataattgttttatatctttgtttactgtctttcccatttttggcttcatgaggaaggacattcttactcttttttgtattttaatgtctatcatagttctgaacaatcaacacttatttgccaaatcagtgaatacacatgctataacatttatgtttttccttaggtgtctgaaaatagtttgtcttcaggattttgtcttctaaggatatgataacaacaatgattatttaagaaacttgaataacaagattagtaatgtttctataatatcttcttctatagtaaatctaaagtgaggagcttgcttttttatattgtatttttccagagacagcttcatgagtcagaggtacctctcaatatatgactcacataagacagtggatttatactgtcagctgcctttttataccttcagtcatctaggtcattaggcagtttgcattcttttctcttggttatataggtattaaagaaacttgccccttattatacattaaaaaagtggtaagctcctattttttcttctaagtatatggattggaaagacttttaaaaatgggtgatcagagaaatgaaggtcagttttttcctaatttttaatttttatgagtacatagttggtacatatgtttatggggtacatgagatattttgatacagacctataaggcttaataattacatcagggtaaatggggcatctgtcgactcaaatatttatcatttctttgtgttataaatattccaattatacttttagttattttttaaatgtacgatgaatttttagtaactgtaatcactctgttgtgttatcaaatactagatcttattcattctatctaactctatttttgtaactattatccatccctacaccctacccccccactccccttcctagcctcagtaaccattcttctactctccatctccatgagttaaatagttttaatttttagctcccacagatgagtgagaacatgtgaagtttgtctttctgtgcctggctcatttcacttagcataatgtcctccagttctatccatgttgctgcaaatgacaggaattcatcatttttttatggacgaatagtactctattgtgtatatgtagcacatttttctttattcattcatctgctgatggacatttaggttgcttccaaatcatagatactgtgaacagtactgtgataaacaggggagtgcagatatctctttgatatactgatttcctttctttggggtatatacctagcagtgggattgctggatcatatggtagttatatttttagttttttgaggaatcctcttactattctccatattggctatactaatttacattcccaccaacagtgtatgagggttcacttttctccatatcctcgtcagcatttgttactgcctgtctttggataaaagccattttaacggggtagagatgatatttcactgtagttttgatttttatttctctaatgatcagtgatgttgagcagaggtaagttatttttgtatggcaaccccagacttcagaaaagaaaaaagcagttgttatttataacaactgttatcatagattttaatcccacaatcatcatacttccttgatgataaaacagtttgaaggaagagtatttggcggtgtatatatttttaaaggcattatgaaatcctacataaattcccccaatcgaatttttccatttaaaggtttaaaaagtgatatattttcacttttttgaaaaagtgcaatttgaggcattcctgttctcatcaccaagatttaagagatattaacactttgtcatatttgtgtcatatcatttttgaatttttttttttttttgagacagagtcttgttatgttgtgcaggctggtcttgaactcctggcccaaggcaattctcccaccttcagcctcccaagtagctgggattatagcctcaagccactgtgcctgtctctaatatcattttctcttgtttttgaaataagaattaatatattacatatgtaactgaagctttcatttgttattatatgaggttttgacccatgattgtttcttctctccctccccagagctgaatatatatgtatttaatctgcatgatagcaagggaagaaagaatttctgtttctaagaggttgatattgatataattggaaggggaaaagatagaatgttgttaaagacaaaatacttggtttcctggaggcaatctattttgctgtttcatctggagccctgtatgaaaggttcagaaaagttcaaagcttatattttttttccaaacttgagttaaaaacagggatcactaatatttaagataacaaacaaaaaactctacaaattgatacttttttcttttcagcaattcttgtgtcgtaaaactgaattgaataaaactatatattttgactatgagaatcaagattctcaagaaagtcaggcaattgagtgaggcctataatgttatgtttttaaatttgctaaatgatggtagcatgtcgagaggggagggctggacctggtggggggactgaataaccagttatctagagacctggcatcatgagaatgttgtcagctttcatctacatgatattggtttatatttttactacttatgtatatagtcttaaacattatttataccatttgtgtgttttacattcatgtgttattatttacataaatgacaaaatccagcttgttttttaaaaaatgtttttgagagtaatctcttttggagatgaatccctgggggtatgtatacctttagtttattttaactgttctaaataataccatcatattatagtttgtttttctaatatgtgttcctccctcctttcccttcctttcccctcctttcctgtttcctttcccctccttccctcttttccggaatttgcgtctgtgtgattcctaggtaatcattactgaaagcatgatcagcattttatggtttaaaaaaaaaaaactgcactgggtgcatttccactaaacgtatagagaatatatctgagggaacacagtagagctccatgtggatactgattgattagtattgggcccgtggagactgctagattaaacaggaggcagatagtctttcctctgggagtcttgcctctgggtgtgtccatcatctgctgaattagcactgcattcagatcagctctaggggaaggttgcttctatcacatggtgcagatgaacctgccctgctctcctcactctggaaacttggctgaggtgggaatctgatcagagcagttggcccagttaggagtccccatgtgccatttaatgacaagtgtgctccctggtgtttgttccgaattaatttcctctgtgtgaatggtgtctacagcttgtggaggtggcctttggggaattagtctcctaagtctctggttgccagatgaaattgtgaagttgagtccagagagcaaactcagagcagtaaattgcatttttttccgctctgaaaaccacttgtctactatgagtttcttgccttttttttctcttctgtcttgagtttttggccttggcacaactataggtttatgctagctctgactgatgtggtcctgtctggttgtcagcatcctctcatgctctgccagccacatgggaagggctctcctccttgcctcctcacccccctgcctatggatccctcttctcttgcagtctgggccattgctgggcatcacttaacttgtttggtttccctgattccctttgtctcccttccatttgagtaatttcaaagcttagctctgattctgcctctcctctgctcctcatgagcttttgatggcttttcatgctacagagaaaatggctcattctccttaacatagcctggaagattttttataatctgactctaaccagcttgtccagtttcatgtcttatcttttccaacactcagccttgctgtggttgatgattccctgttacccagacctgctgtgcacatctcatgcatctagttttgcctctacctgtacacccaatgcccttctctgataatggaaatcctcctctctctctgcaagcccagcatgcatgttcccttctctgcgaggttccccagtaccatctttaggagttaaccaccagcccagttgtgttcctttagatctttagaattttttgtctgcctactatcataatgcgtcagatatgtgtctttccccagtaagtagtgaactccttcagagcaagagccatgaatatgtccttggaaagataccttagcacctctagagtctcttgcatcttttaggattgaatagctgttattggaggaacactgttgtgggtgcttggtgtgagggtgtgtggtatactgaactggagtccagagacccaggctaaagccaagactctggccgtgttcaatgatgcttttgcctaccaatgatcagtaaaggcttattaatatataaaatgatgaaatggtgttctgtgtgatttggggaccatccctgaacctctctgtgttttagttagctcatttggaaaataagagggtttgaataaacattattatagatttcttttagctctaaaaggttcatatattccttcttttgtgtacattttatattttccaaattatctacaacgagaatttattactttaaaaatttgagctgtcaggttaaagttcttataactcctagcaaaaataaatgagtcaagagacaagcattaagcctaaataccaatgaacccctataggcaggcctatttagcattggagtgaaatatattagtgactgattttacagtgctgggagttttgcagaatcaaggtcagaaatgagattgtgtaagccaggactgctcaagactgtataagactgcatgtggccagtattaatcaattaagaaatcaatagtgatttaattgatcaccactatatgcttggcactagatgagagctttttcattatctatctcatttaatcttaaaaatcactttgtggaattggcatggttattttatcactttatatgagaaaataggctcagagaagtgaagtaacttgtccaaagtcatccaagtactcaattttcaagtcattattcaagtatagattcatcaacttttaaagctcatgatcttttgtttatacatcacattgcctttctgttaggccagaggtcctcaacccctgggccacagacaagtaccaggtccatggcctgttaggaaccaggccacacagcaggaggtgaggggtggatgagcgagcattactgcctgagctctgccccctctcagatcagtggcagcactggattcccatagaagtgcaaagtgtattgccaactgcgcatacaagggatgtaggttgtgtactccttacgagaacctaatgcctgatgatctgacgtagaacagtttcatcctgaaaccatccccccatgccccctccacaccccgccacgggtctggaaaacttgtcttccacaaaactggtccctggtaccaaaaaggttggagactgttgtgttaggcaaaaaaatttgtgcatatatgtggctaaagaagataatgggagttgggagatattgctactaggtacctcatattttaaacaaatagtgccgtaattattgatagtgcttgaatttcattccaaatatcctatcttctttaaagaagcagtttactactgttttataagccattctcattagcatctctatcaataaggattcttatttgtaagccacagaaacagacactggatgatttaaattggaaaggaataatttagagcatattgagcaatttacagaatctctgcaagggccttagaaccaggcagcctggaacagtgcgtaaaatcacatcattgaatttggtgatgagagttggccaggggcactgtccgtgtcacttggcaattatcctgtacttcagcctccactctggaactctgatttagctgctgctgccagttgctgtgacaatgtgtctacatccctttcccctcactaactcccaagttagtctggggctggtatgcctgattgacagaaagcaggtcttgagtcaaggtcatagctacaatggaggctagaatgtaaatgtcggatatttttatttttagagtgggatgtgggattttcttcctaagagagacactattcatgcatgggaaggtgattcagatacacagcagccgaagtgaacgacagatactgcagcatctatgtatagattgtaattcatttcaataacatgagttttctcattttaaaaataagaaaactgatatggaattttccattcccttgggctaggaacttttgggggctctctcatacattttctggaatcaattgtcaccaagttctattgatgcttataaatcaggctcaggtataccacttcctctctattactgaagatataaacccaatttgagttttcaagatgttgaaattggagtttctcaataatctctctttccttgttctctctgaatttcttctcttggatctgtcctgcaaattgctgctagaatattcttccataagcactgttttcatcatacctctgcattgctcaaaattattatggtttaggggaaatactgtaggccactaatcttgcaaaaattttatggctaagacatcagaagcacaggcaacaaatcaaaactagaaaaatgggattatattcaacctaaaagcttccaaacagcaaagaaaacaaagtgaagagacagcttgttgaatgggagaaaatatttgcaaaatatatattcattctacaagggactaatatccagaatatactgggaactcaacagtaagtaatctcattaaaaagtatgtaaaaacatgaataaacatttctcaaaggaagacacaaatggccaacaggaacatgaaaaaatactcaacatcactaatcatcgggaaatgcaaatcaaaaccacaatgatacatcatctaatcccatttagagtggctattactaaaaagacaaaaactaatgggtgctggcgagaatgtggagaacaggaactcttatacactgttggtggtaatgtaaattagtatagccattatggagaacagtatgaagatttccccaaaaatagaactattgtgtgatccagcagttttcgctactgactgggtatttattcaaaggaaagaaaaaaagtatatcaaaggaatacctgcacccccatgtgtattgcagcactattcacaattgccaagatatggaatcaacctaaatgtttacctgtcaacagataaatgggtaaagaaaacatggtgtgtatacacacacacacacacacacacacacacacacacacacacacacacactggagtactatttagccatacaaaagaataaaatcctgtcatttacaacaacatggttggttctggagatcattatgttaagtgcaataactcaggcacagaaagacaaatatcacatgttctccctattatgtgggaaccaaaaagttgatctaatggaggtagagggtagaatgatagttaccagatgctggaaatggtgtatagggggtgggggttgaagagaggttggttaatgggcacaagcatacagttagatagaaggagtaagttctaatgttcaatagcaaagtagagtgagtatagttaataatgcattacatttttcaaaatagctagaagagaggacttgaaatgttccaacacatagaaattataaatgtttgaggtggtggttattataaataccatggtttgatcattatccattctatggtggtaacaaaatatcacatacataaaaatgtaaaaatactatgtatcaataaaacatttaaaaattattatggttaaccatagcaattggtttattcaggaattagtgacctataataactaatatgccagtatgccaatttggatccctttgttgctaagaggcaatatggaggagtaagtttgctttgctcatgctgtctcctgtctagaaggccatctctgttctttcagatatccaaattctaccttttcttgagtgtagcttgtctctccttttccatgaagtccccatgcctttccagacttacttactgatttttctatttgatacttaattatttgtaatatgcatttcatagcttattatttagtgacattttctaattttatcaagagtttttttttttttttgagacggagtctggctctgtcgcttaggctagagtgcacgcaatctcggctcactgccagctctgcctcctgggttcatgccattctcctgcctcagcctcccaagtagctgggactacaggtgcgtgccaccacacctggctaattttttgtatttttagtagagatggggtttcaccatgctagccagggtgatctcaatctcctgatctcgtgatccgcctgccttggcctcccaaagtgctgggattacaggcgtgagccaccgtgcccggccttatcaagagtttttaattcctgtattcttatatctcttcctgcttcaacccccatgccaaatccttaagggaaaaaaacatgacatagacttatttttatcctattcctagtgcttgacccctaataggttcttggttgatgattaactgaatgggaaataaaccttggatgtagatttctagtaggtgttatattttgcaacgtgatttaacagttctagaccaattgttacttgggcttctgagcactatacattattcaccatacggaattgaatgccattgagtacattaaaaatagtcctgtatatatgacttgaaccacagctgtttccatctagtattgagtaggtgcatagttaacctccactattcctattctttggaaatcagcttaaaaaatgataataaataaaactgcagttatcagagttttttaggtaatgaaaacgggcacacgtgtgacacaaataggagttagcaggatactcttcgtaatatttttttccttgtgtctattataggattttccattatatatttctgtggcatctctccatcaggattctcattgtgcatgaatctatctatgcacaagagtgtcaactctgccagcagtatctgacagcattgtaatttaatgtattcagctgctgtgttaagtttcaggaagtttcctgtaagccaaaacttgtaaagctttgtctccctttaaacttttgttaatgatattatttaaacatttcttttttaagcctaaattttctaagaaaatgtgatttgtttacttcagtgcttgctgttatagaggctgtcattttttcccaaactagactttattgtgaggtgtggcatgcttaatttgtccacttgtagaaaatgatgtgagcgtatggctgcctgttgcaacttgaaaaaccttaaaaccaaaatctcaggccatattatttaatctgtcaattttccttgttacatagaaattcctactagaagtccaaagatagttttcggaggagccctgagttgcaggatgtttatcacctcttagtgttcacctttgatttgttctttttcttcttgctttgcagttgtttgatttgtaagaattatttagatattaaaagcatgaactgtttttaatatgtttacttttgtttattatggtgctatataatagttctgcttttttatgaattccagttatcgaagtggtctattgtgttttcttcccatattttaaatcttataacttttgaaaaatttttaataacctagaattgttctggtgtaaggtaaggaaataattaattttaaaaatgtgataatttcagccagttttggtaagcattactcccagttctcttattttgtattaatgcctagccagatttttccctcatttgcttttctatgtgaggcttttccagagcgtcatcctattttaaaataaaatgtcagcctgcttctttcactttgcagattgccagtcatgcccagtatcttaccctgtgcagatctggtggtcaagctcattcttcctttccccaggtcatctgtgagtgtaaagcatcggagtcctgtaggcatcacttgaggtgatcctctctaaaagatacctgttcaacttctaaccagcttcagaatgataagacttttttttctgagtgtggaaagtgattaaaaaccaacaaaacctgtcaatgttatttctttcatcttctctgtgccttctgtgtctgttttagaaggaaattagactgtctgttaattcagagcaccttcatgagtagagaaaggacttctgaaagttgaactatccacatgtccccaaaatgtaaagaccgttttgagagtatcttctagtctgttatttttgtttcttaccactttttgacctttaatgttttcctttttcttttaattttcttccattgtcttggtggttctctatgctgcctttgccttattttccatcttcctttccttacaactggtcctgtcgcgtattgtttctgtttttcacccatttttctgctgtcttcttactgttcattgtgggatgatctcaggatatcctggatgaatggaaaaagtgtgtttggagccttgctgtaacatgattacctattgggtgattatgcttgtatagaaaaataggattgttcagctcaaacactgagggaaaaactatctcctagatttccttactgaaaaatcccaaatcataagagacagattttagtcttgtcatcagaacataatgactaagggaaaattcagatgggactgtgatgttttataaatttttgtgaaatagtaaaacttccatgtctcatagcaattttaaaaattatcataatttctttagttatagatataaatagagtatgtggaattgaaagtatgactggaaagggacttgctcagttccctgggcaagaacttcactttcttctggttccaagaagaaaacatacaactcctgtcactcctttctgtgtatgtctcttctgtcctcattgccttgtggtcttctgtggctctgaatgtgtagaaaatgctgatggagagatgtgaactctcccataagagcagtaatgcctgagtgacaccccacctctgtagtgaatcttcccagcccccaaaggcaaggttgaaaatcctggtctaggctgctgctgttcgagtccaagtatctctaggatttacccaatcagtggcaatttatcagcagaattctaatcagtcttttcttttgttgaaaattgtttgttaaaaaaggaagaaattatttcaaaatatatggtctttataaacacataaacttctagaaacatttataactgaaaatgtgttgtttttacaatgtatcattttctagtagcagtaagttatgctgtagctcaactattcttaaaaccttcctggcaacgtttctctaggaaattgagatccttaaaatttttagttctctttgctataatgtacaaaaagaaaaagttgttttgtaaattctgtcattctcagtgtcataatgtttggattatttgagaaagaactacagtatgagtgaaaatttggtattctaaggtatagaataaaatgggatttgcctacaaaaatgcattgtaatttgcacagtgtagtgcctttgcatagtgattttatgctattgttttggaatgttgtttgaatatcttctttcatctttcagtgcattttgaatatattttctggtcctttcccttaatgtataagttcattggtttacaaattttagttttctcaaaaatatttatgacagggttttgcacattataaacgctcataaaatatttgcaatttgacttggctataagttagagctatattaaggatttccagaatccagatgatgcctgtgccatgctgactgtactatccaaggacaaagaaatgggtgctgatacagtaatgctcttttctttctggaaatgtgatcttccttgttgaacatgttaaatattttattcattctgtgttcttcttttcattgggagttagtgttgatttctcagactcttaggttgtgtctaattatagtgctgattccacctcaaaatattgctgaactgacagtggtcaaaggaaaccaaaaaagtagtccaaagaaagaaatgatgaggctttgcttatttttcagttgccaagaataacataaaaatctctttaggtgggagaaaatcacaagagcatctcacaatacttcttaaggagcagacgcatgatctgataatataataatacccttccttttgggcaggttgcgctcagccttgtgaatagtttagaatagcttatttctagggaagttataaaaaatgccttcatcgattggcattatttatcaggaacttcaaaaatgttcttactctttggtccagaaaattattcacttctaggaatttattatcaggaataattaggcatatggataaatattttgatacagcagtattattttcattgattgtaattgttaacagttggaaaaaaacttcatttgttcaataacagggtattgactaaatgcattgtagcctcttatactatggaatattgtggagctagaaaatcatcttatgtggcaaaaaatagagtatatactctgaatcattggggcaacacttcagattatagaagatttagtgtcttgtcttacattttagtgttttggaattgaaggtgacttgtgagggcagctgatcattgatgggtatttgaatcatgaattgagatttagggtcaaaagtaaccttccaatttaattaaaataatagatcatttgttagtttttatactataaaatttccttttttctagtagtcttgaaaaaatatataccaacagaaatattatgttgtaagaaaatgatgtttggagtttgaaaagcaatttgaaaaagggtgtgactcttttgagttttagtattctatgcacattcattacttttgccttatctttcctaatcacatttcattaaaagaactttcttcttaggcctgtcatgttcacttcattcatatttgtcatttctgtgttcaataatagcccatgttcatgagcagtttctaagcattagcatttcttagcccatatgtatcccgtatttctactaaagatggaaatgttagtgttaaaaccttgagaaatatgtcagcaaagcttcccaggacattgtataaaatatctttgttttgagacttaattaaatatgtatgtagaaagcatcgtttctatgcaagaatttggattccaaaatcaatcatcattggtcaggtttatgaaaatagccgcaattattatgttttgcctgataatctgagcattttatttctgtaaattgttaaatctcaatacttgctacttatttgtaaatgtacaagtttctttagagaaacagtaccatttgatcagtttctgttcctgctggtcctggacttgtacactgaaacatattgctgccttcactgcaaaataggaaaaaagatctaacaagcatgttatattgcttttaaagtaacatgccataagttacattgaatttcaaggtaaagttaaaaggtcaaagatgtatatggattgctagcatctttttggtctcagatgtttgcaaagctgagtcagacttaggaggtaggagtgtgtatgaagcagagtggggctgggctatgtgctggttataaactgtgaaactctaggggtatgctgcacagggatttgctatgtgcacattgcacaaggccaagtgcagtggccctggagcactacgaccctgctcttgtttctggcttgttccccttgagtagcaagtgtgttatgtggaatcaaatcagtgctgctaatcaaatcttttaagagtatctctaaaagtcctgtttccaatataagagcaaaggataaatcagattcttttaatgtggggagtaataacattttctactatataaggggagaagcagcagagttgggttctaaatactgagcctaactgcaaagaaaagaaagttgctgtggcttccagctctactctttcaaatatctattttaaatgaaatatttgacaaaggaacacgaggaaagggttagaatttgcagtggaatgacctttcttagagaagtaccctgatttgaaatgatcattttgacacctagaaaccaagaatttctgtggctttaatgtacagtcgtccttctgtactgaactgtgggttttgcgttcttgggttcaaccaaccagagatggaaaacatgaggaaaaaagcatctgtactgaacacgtacatcctttttccttgtcattaatccataaacaattcagtataacaactatttacatagtatttacatttacattgtattaggtattataagggatctagagatgatttaaagtatatgggagtatgtgcttgcttatatacaaatattatgtcattttatatcagggacttgagaatctgtagattttgttatctgagggaggtactggaacaaatcctccatgcattctgaggaatgattgtagttcttttttttgggtgatgagcctagaaaataaaatgcactgtacattataacatttgtggttatgttaggtttggtctacaatgttggactgagcaacacctcatttgaagaaaactggtggttaggattgttcactgtgctttattatagaggatttacaataaaaatattggtattttcacagcaagaaaaattgtaccaaatattccaacgtatgttcttaccctcaagggttgaagatagtaaaagccattattggagacttaaatttcaaaatggtggcatagaagcaagctggcttcaatggcccccacagaaaaccaaaatcaaatgtacagcagcaagactaacaatatcccagaactcagtatgaggatgagtgagttcctggggccacagagaagtaaagacactccaagcagatggtagactataacttccatatctgtgatgccttttcccccagtcagcccagcagcaagcacatggaaaatgttccacaactcatggtttctaacactggaaaaagtgagattgaggtggacagccatcttccccattgtcttgtgttccctcacaggagacctgccctgcctaaacccataggaagcagcacaagggcctgaagggagaaatatccctgaggacaactggagacaaaaggcagaggcagggctaccatctgtagccctggaaactctgctttgtaacttggccaaaggagatgccaagtcagtggcttttcagtaccatgctataggtggtacattccacagatatcctgggcacaaaccctgagccagcctccccacactgctagtatcccttttgagacctccctcatttgggactagtagcacactaattgtttgcttgagccaaggaaaacctgggtttaaggttccatctaatgctggaaaggaggccacaacctagcaaagaaaaaagaatgtaacaggtaaattacaaagaatctataagcaaacatacccaacaaaaaacaaaacaagccagacagagaagactggaataaagacacggagatgcatccacaagaaacaatagtaaacagggaaccatgacctccccaaatggacaaagaagggaaccagtgaccaaacctaatgaaacagcaatatgtgagctctctgaacaagaattcaaaatagcaattttaaggaaactcagtcatctccaagataacacagaaaagcaattcataaatttaccagagaaatttaacaaagagattgaaatgattttaaaagatcaaacaaatttggaactgagaaatacatttgctgagctgcaaaatttatcagagagagactcaacagcacaattgctcaggcagaggaaaggatcagtgagcttgaagatgggctatttgaaattacacagaggagaaaaaagaaagaatggaaaggaatgacaggtcacgtatgagatatagaatattagctcagaagatgaaatataagaattattggtgtttgagagggagttgaagaagagcgaggagtagaaagattattcaaagaaacagtagacaacttttcaaaacttgagaaagaggtaaatttaggcacagaaaggtcagagaaacagcaaacagattcaaccccaataaggctttaccaagaagcataataaactctcaaaggtcaaggacaaagaaaggattttaaaagcagaaagagaaaagaagcaaataacatataaaggaactccagttggtctggcaacagacttctcaacagaaaacatacattttcaaagtgctgccaggggaatcaaaaaaaaaacccaacccccaccccacccctgctgccatccaagagtattgtttcaacaacgctatccttcacatatgaaagagagataatctttgccagacagacaaaagtttagagaattcaccaccaccagacttgtcttacaagaaatgctaaagagagtttttcattctgaaagaaaagattaatgtgcaaaacaaacaaacaaaaaaaaccaaaaatatttgaaagtataaaacccactggtaaaactgaagttcggatacagccccagaatactttaatactgcaattatgatgtacaatacactcataactttagtatgaatcctaaagcacaaagtatcaaaaagaataatagctacagaaacctgttgagatagtcaatacaaaaatgtgtaaattgagaaaacaaaaatgtggagagaatggagttaaaataaagattaaagttctctcttgtttcttttttggggtgatctgtgataagttgtcatctctgtaaaatgacttgttatgtctacaagatttttttgtaagcctcatggtaacctacatgttaaaacctataatagatatgctaaaattagaaaaagcaatgaattaaaacatgttaccagaggaagtcacttaaccacaaaggaagacagtaaaaaaggaagaacggagttacaaagcaaccagaaaacaagcaacaaaatgacaccagtaagtccttacccatcagtaatagcactgagtataaacagatgcagttctccaattaaaagacataggctggatgaatacataaagaaacaagacctaactatatgcttcctagaagaaacccacctcacctatgaagacacatgtaggctgaaagtaatgggatagaaaaatatattctatgcaagtaaaaaccaaaaaatggggggaataattatacttagataaacagattattagtcaaagactttagactctgcctaatagagaaggtgactatattaataatataaggggtcaattcagcaggaaaatataacaattataaatatgcatccaacactaaagcacacaaaagcaacattagtaaatctgaagggagagatagattgcaataaagtaacagtcatggactttaacactccactctcaataatggattaatcatctagataaaaaaatcaacaaagaaacagcagagttaaactactacactagaccaaatagacctaaatgacttttacagaatgtgtcacccagctgttgtagaatacacattattttcattagcatatggaagttcatccaaaatgcaccgtatcttaggccaggaaacaagtctcagcaaatttaaaagagcaatatatcacatgtatttttttaccacaatgaaataaaactagaaatcaatcacaagaagaacctctctgaaatgagacaaacacatggaaattaaacaacatgctcctaaatgaccaaagggtcaatgaataaattaagaaagaaatttttaaaattcatgagacaaattaaagtggaaatatgacataccaaaatctgtgggatacagcaacagcagtactgagagggaagtttatagcagtaaatacctacatcaaaaaatataaagacttcaaatgaactaatgcacctcaaggaactagaaaagcaagaacaaactaaacccagccttaaaaatgaaaagttggttttctgaaaagataaacaatattgacaaacctttaaatagactaccaaaaaagagagaaggcccaaatgaatacaatcagaaacaagaaaggcgacataacaactgagaccacagaaataaaaagaatcattagaaactattataagtataggccaacaaattgggaaaactagaagaaacagataaatgcctggacacatacaacctgacaagattaagccacgaagaaatagaaaacttcagcaaaccaataaggagcaacaagattgaagccgtaataaaaagtctctcattaaagaaaagcccaggacctgatggcttcactgctaaattctaccaaacatttaaagaactgataccaattcaactctaactcttcaaaaaaaaaaaaaactgaagaggaagaaatactttcaaacttattccacaaagctaacatcaccctaataccaaaaccagacaagcacacaacagaaagtagactacaggccaatatcactgataaacacagatacaaaagtcctcaacacaatattagcaaactgaattcagcaacacattaaaaagaccattcactatgatcaagtgggatgcatcctaggatatgatagttcaacatatgcaaattaataaatgtaatgtatcctctttacctaaccaagaacaaaactataagatcttttcaatagatgctgaaaaaacgtttgataaaatttaacatcactttatgataaaaatcctcaacaaacgttaagaatagaaggaacataattccaaataataaaggccatatatgacaaacccatagtcaatagcatattgaatggggaaaaattgaaggcctttttgctaagatctggaaaaagagatgcccatttttattcaacataatactggaagtcctggccagagcagtgaggtcagagaaagaaataaaggccatccatattggaaaggaagaagtcaaattatcgttatatgcagatgacatgaacatttatttagaaaaatctaaagagtccacaaaaaaaaccctgttagaacaaaaaaagaataagtaaagttgcagcatacaaaaccaacatgcaaaaatcagtaccatttatgtaagccaacagtgaacaatctgaaaaagaaatcaagaaagcaatctcatttgcaatagctacaaagaacataaaataactagaaattaatttaaagaagtggaagatctgtataatgtaaaccttaaaatgccgatgaagagatggcacatgtatacctatgtaacaaaactccatgttctgcacatgtaccccagaacttaaagtataataataaaaaaaagaaacacataaaaaaatgctgacgaaagaaattgaagaggcacataccaaaaaaaggaaagatattccatgctcatggattgaaagaattaatattgttctgttaaaagaaaaacttcaggtgaattaaatttaaatgagtttagttgagcaatgaacaattcatgaatctggcagcccccagaatcacagcagattcagagagactccaggggtgccttgtggtcagaacaaatttatagacaagagaagtaaagtgatatacagcaattggaagtgagatacagaacagctggattggttacaggttggtgtttgccttatttgaacacaatttgaacactcaatagtctatgagtggttgaagtgtggcctctgagattggccaacactcagctattgttacaggtgcatacttctaagttaggttttccatctcatctacctattaattcaggttgcagttcatccacaaggactcaaatatagaagtataaagtccttctcaggccatacttagtttgctttaacagttcaaatgacagtgctactcaaagcaatctatagattcaatgcagtccttatcaaaatatcagtgatattcttcacagaaatagaaaaatgttctaaattttatctggaaccccaaatgaccttgaatagctaaagcaattctgagcaacaactacaaagctggaggcatcacagtatctgacttccaaatatactacaaaaatatagtaaccaaatcagcatggcatggaaacaaacatgtagaccaatggaacagaatagaccacccagatataagcctacacatttacagccaactcatgttagacataggctccaagaacatacagtgggcaaaaggtggtttctttaataagtagtactgggaaaactggataaccatatgtagaagaatgaaacgaaacccctatctctcatcatatacaaaaagcaaaatggattaaagacttaaatctaagacttgaaattgtgaaactactcgaagaaaacactggggaaatgctccagaacataagtctgggcaaatattttttgtgtaagatctcaaaagcacaggcagccaaagcaaagatagacaaataggattatataaaggcaaaatgtttctacacagcaaagataacaatcaacaaagtgaagagacaactcacagaatgagaaaaaatatttgcaaactatccatataacaagagattaacaaccagaatatataaggaactcaacaacaaaagaacaattactgatttaaaaaataggtaaatgggtactatgctcactacctgggtggtgggatcatttgttccccaaacctcagcatcatgcaatattcccatgtaacaaatctgcacatatacctcctgaatctaaaatatgagttgaaattacaaaaaataggtagaatatctgagtaaaaatttctcagaagacatacagatggctaatatttatacgaaaaaatgttcagcatcactaataatcacagaaaagcaaattaaaaccacaatgaaccatcatctcactccagttacaatggcttttataacaagggcagggaataatggatgctggtgaggatatggagaaaatggaaccctcatatactgttggtgggaatgtaaatggtaaaactaatatagaaaactgtttggagattcctcaaaaaattaaatattgaattattatataacctagcacttatattactgactatatatccaaaatagtggaaataaatatattgaagaggtatctatctgcactcccatgtttagtgtagcactattcacaaacaccaaaatatggaatcgacctaaatgccaacaatagatgaataggtaatgaaaatgtgatatatgtacacaatggaatattattcaaccataaagaatgacatcctgtcatttgttgcaacatggatgggactggagatcattatgttaagtgaagtgagccaagcacagaaaatcaaatattacatgttctcactcatatgtgggagctgtaaaagtgagtcttatgaagacagagagagattggtggttatcagagtccaggaagggaaggagggagggagggatgaagagaagttggctaatggctacagatatacaatttgatagaaaaaataaatcttagcctgtgatagatcactaaagtgactgtagttagcatgactctatgtacatttcaagatggctggaagagaataatttgaacattcccagcataaagaaaagttaaatatttaagttgaggtatatgccaattgccctgatttgatatttacaaagtatatgaatgtatcaaattacagcatgtactctggaaatatgtacatctagtatacatcaataaaaatttttcaaggaaaaattattggtggaaagtaagttactatattaatttacatattattctatatttatgccagacaacaatcacccaccttcttttttgacttggttcatatttagttaagttaccattcttacaaatatggatatgaaaaaattaaattggggaacttcgtaagttatgtttttgttacttcagttttagatattttttctacgtgatagaacctggtgtcttttttttttttttgataggtgaacactaaaaacagaaaaggcaaataaagaaactgattttgaattaggaagcttcttacaattaattgagttttcagtatatgccaggggactacccaaggtacaaatatgaaatgaggtaactaaaaagtgaaatccacaatttacatagctaaatgaaaagtactctttcaaagttctataattatcataggaaacagtaaggttgtgattgctcaaagaatttttgggtctctcatttctatattaccactttttcctgataagctgtgctttcatcacttttaagttttggacttctgatagtattttgtttgaacaaaaggctggttccacagaggaataaagaaaaaaatttgaaaatcatttctgcttgttgtacaactctaaaagcatctttgcattaaaaaaatcttcttctgaataaaagtttatgtatacctatcagtaaaatttctaacagtatagaaatgttaaaaaatcaatagaaaagcgcaatttcatagcagtttcacctcctagatagtcaccattgttgacagttcggtgcatgttcttcttttttttttttttttttttttttttgagagggagtcttgctatgttgcccaggctggagtgcagtggcgtgatctcggctcactgcaacctccgcctcctgggttcacgccattctcctgcctcagcctcctgagtagctgggactacaggtgcccaccaccacgcccggctaattttttgtatttttagtagagatgaggtttacactgtgttagccagaatggtctcgatctcctgacctcatgatccgcccacctcagcctcccaaagtgctaggattacaggcatgagccaccacgcctggcctcggtgcatgttcttcttgaacatcctgcttattggaggcacaaacagccacctgcctgggaattgggaaggggtgtgtgggagcaggagccaccttgagcagtggtcaggtgtgagaacacccctcctatttttacacaggcatcgtcctttgtacagagtgggggaaggccaagagaccatcttgaacaatctagcttttggatgttgaaattagaataaatattcaaaaattcatgaattatgaattcagcctcgttagaattttcccttgttggtttgtgttcattccacaagactacatctgataaacctgtatgtattattagttactctttatttttttaaagtcaagatattatctagattaatatttaggggaaagcagaaggctaaaagtaaataaactttgaaactatggtcttgtgttaatctcttcatggcttatcgctctatgtcagtggttctcaaatatggtacctggaccagcagcatcaacagcttctgagaacttgctagaagtacaaattcttggtccctactgagttggaaaatcttgtggtggtgaagcccagcaatctattttaacaaatcctccaggtggtattggtgcaggataaggtttgaggacactgctctatataaaagccaaaggttaaaaataaaatcaacttggtatttctcctctctcattctccactaacttttaccccaacctaaaggtcatgatgttactgaggcataacatgatttttcttaagagctgagattttttacatctctgctgttagaatgccattctccaccattgtctacataacccattaataactattctttaaaattttattctagcataactcactggagaacctcccttgacccagaaatccagctggacttgactcttatgctttttggagccctatgaatacctgtttgtagttcttcaaatttgattgcagtgatttgtttacatgcctctctcttttccagggtattgataactccctaaggaaagggattacatctttcccttgccctttcatccctgacacctagtagaatttatggcatatgcagatactcaataaatatttaagtgaaggatgaaatgaaaataaaatcataacttctccaagattaagaattactaagaggcaaactagtgttataagaaagctgaagtgacttgagtttgaattatactgactgtatgttagactgcttgggtaatttctctgacactatatagtttatatagctttttactatataaaattgacataattcctacctcacaggttcacgtagaattcctgacacacagttaacactgaaaaatggtagctgataatcaaataaaaaatagtaacttcttacatattgtagtaatttgaggactgctatcttattttgaagtcatatagttattataggagtattttcacttatttaaaaaaattattttactcattagaaccaaaacaaacttgattgaattaaactatttaatattttgaggagaaagtaacaaaatgattcagatatatggatggcaaacattttaatcagtatgcacttatgattttaaaaggtccttgtatggtaaatttgcatatatatatatatttttttttttttttacaaataacagcatgtctatttcttgaactccacttgtgagactaccacataacttattgactctgtcatgattcccaggaatttattttgtgagttaaaagaatttatacctgtgagcataataagtactcttacaaatatttgatccttatttaggccccaaacagattcatatatttttaaaggagccaggtgtcagaaaattgttgccatcatatattgagaaaatttaatatttatacattttagtaggaaaaaatatagtgcctgtccatcatattagggatggaatctataatctatcatcaacttctggaatatgaatatatatggacagtcaagtacattggccccagtatacatgtcttgttttttctaagagaactgatccctaaaaaaaggaaaaaataaccaatgagactggttcgctgtttgctcactgataggagttggaagccgggcagcttggttgggtagagttgaggttagagatccaaataacccatgccactcagtttagagatgagagcctggggcccagagaccatgtgacctggccactgtctcactgaaagtcagggctgcagcaaagattagaaactctgtgcagtctcatgctggttgcatggcattttgaggcagtcacattggcaaagcagctgtccaaggagtcactttgttatactgtttgatactagggactttttcatgtgacctgaaaaaaaaaaagattaagcttttctgttttactttgctgtaattcaagtaatcagtcaccccactcttgagcttttacccaatcttcttcaactctgagaattaggatttaatgggatgggcgttagcaatgaggtgagatcagtatgggaatcaggaattggatgggggatatctttcggtccattactttctaataagctcagcacttttgacctggcctcatcagaatggttgttttgaaacaggaaagtcaaaatgtccctctggccaaatcaaaaggattcatatattctttatatagggctcttcacatcagctcacatttctgtttctaaactattaaagccctaacgacttatgcaaatgtttataactggatataaatgtttgagtctgggctgcccctgtagggggttttccctcttgattcaggttgttatcaagtattctctgggggaaataaccttaaaagatcattcagattccaaaacatcttacatatgccatattttgacagggcattcattttttttcctggggggaggggagataggttaagagagaagataataaaaagaaaacagacaatagtaccaaaacagaaacattgtattacaattagatcacaaataccattgcacagaagccaatataaggtagatctaccctggttctttctgtccaaagaatttcattgtttgatagtcctgtaagagtttttatatagcaccgaggatatgttaaggttgccattgtggcaagggtttaaaggacatagtttactaagttatttagatgctagttatcttggtaacttcgtccatttaaaaatatttcttcattcaggatttctgttccattcctggagactggcaggaggaaaatcagcttggcagatgagaacaagcattgttgtctgccttcagagtggctggcaagagtatctcagaagcagtttctaaagaaggggatggtggcccccaaatacctctgatgaaagaatttgggacttcagtgccctcctctctttttgtcaagtaaactatatccattcttctaggtgcaatacttcatctgaggttaagctgaaatgaaataacaatgaaaaaccgtcagagaacaatgctgaatactcttcccaacctagtgcatcagtggcacaccccacactcactggggtcattttgcccattagggctgagctacttatctacatcctttgagaggattattttctctgtgccagttcttggtaaatactcagaccctaagggaaattcaaattatcctggattaaccacatacagtcagaggagctaatgactgaaaaatgctccttgttcgttgcaaaatacccaagacccagaaaaagaagtcttccagggctcctaaggtggaaattccttttaggattttaaggccacaagtaacagagtcctaaagcagtagattttatcacagtttcaaaaaatagctatgtaattcaactacagttgctccttaagacagcaaagacttagaatgaaagagagaagggaatctcaaaatgaaattaatcaaaataaaagtcattcttaagctttcttcttaaatcaaaatcaagagaattttttaaagctgattaaatttaatgtatttaggtcaaaaggaaaaaatgtatcataatcagacatagtcctcagcaaaggctgaaaagggcaaaagcaagatgaagggagaaaatgatgaatcaagctaatttccataatcctgttttattagtactggcccatgggtggtacagcacacacaaaccacaaatagtgtcaaattcctcagtggaaaccaggctactcctgggccagcccagatttgtggatcttgcctgataccagttcagggcagccaacttgatgtggcatgtcctactcacatggatctttgagattcttgacagttctgggtcagttttcaaccattgtcagccagagctatctttggtcccgtctggaacagaatgaaatttctaaataatgcccggatttaatcctccctgtgaagcgccttctgcgcagtaattaactagagtcagatcagattttctaaagtttgctcaagctagatctgcgtctctgggatttggcgtgtccagcagtacgcaagtcaagtggatccctgttttcataatgcttgtcctatctgcttcctttactatctcccagatttactccctaatcaattcagagcttaggctattgttaaaacaactttctcagtttaggcttctttctctgatatagctactagattagggttcttaacatactcctgtttgacagttcattctccagctaaaaatatctttattggcttatcataatataaataacaaaatctagaccccttagcctggtgtttaaaactgtctacctccaacctgcaacttcaactgtatctcatatccctcatcctgaatccaagctcctcacctccaagtgtttgcttgcattgtgtctgccactcagccgttcccttgttcagatgtagttactgagcatctgtgtgccatgtggtggtctaggtgctgcggatactgcagtgaataaggccgacacactccctcctctcatggaacctgtgctctcattctgggagacaatatataaataggtgatatttcaaatgtcagaaattaggacaagtataaaaaggtgacggaatagaatgcagacaccctttcaactctcatagccctacctggctctacaatttatgtagcgttcatgacaggctgttttggtttttgtggttttagttacacactctggggcagatcacccatgatgaaggtattgaccctactactcactgcctcagtgaccatgggcaagtttcttttctctttttcagtttagccgtctctaaaatgaggataatatcattattctgttcataaggttgtcttgagcattttatagtgtctgcagaatgctcagcacagattctggtatgtgtgtgtacatgtgtgcatgcatatgtataacatataatgacacttatttatcgtcatttttgtttgggtgaggtaaattttaaataatataaatatttatactgataaacagataacttttaaaccagaatatcattacagtcctgtaatgtcctgtatattattataatgtacgattgaattatacattactgtttccttacagtctacttaattgcaaaccagaaggagggtacaagctggtagcctctaggagcaaccatgcatttctgagtctggttgtgttaactgtttctttcgtattcaatttgatagtacaaaaatattttacatatacattaattatttctcctagctaaacactaagtccctaagtttcaagcgaatacaatgtggaaatagattagaattaactgagatcatggtaattttttgacattttattttacataaatttgtacccaaatgctacagactcaacttactagtaaagttttcttaagtaattaacactattatgtaatgggccttcccactctagtaaacagtactagtggctttattacctgttgaaatttatatgcatagttgctggtagctgcagtagtatctgtttctggtgcacacctgtagtcccagctactgaggagcctgaggtgggaggatcacttgagcccgtgtgtttgaggctgcagtgtgccaccgatttgagctgtatttttaaaggaattattttaggctatgaatagacagcatctatatttccataatacttaatgtattttaacactgaaaagttttcttgtaataatacagttaaggtttctattttggcaaaatgtaagaaaaaaaatactcaacacttgctttagcagtgtgatggtgaagtgagtaacagatgagtttagatgctgtagttgttcacagggcctgagacccagcagagggttcagtggaacaatggggaatgttagctattgaagtacttacattccttggaattcaagatatccaaggattaatgagtgctataagtcaaattgtaattaaagattcaaatccaaaggtgctggcagcattgcctgcttttagcagatctgaatattgaaagctgggttcaaatgtaggttgtcatttacctgccatcctcctagaagtcactttacttctctgacccttagaaggttctcatttcaaaatgaaaatacagaaatcatgggttttgtgagattatataatactaatcacttaacctagtgcctgataatcataagcactcaataattatttgctgagttaaagaatggaaaaaaacaagctgattctcttggacctcagggtttcaaaaagctattctatttaagcctgtgattttcaaccctggctgcatactagaatcactggaaagctttaaaaaaattctcatgctaaggccccatcacagactatttgagtcatattctctgaaggtaaggtctagacattagtgtttttcaaaagctccacagatgtttctaacattcagccagggtctctgccatctgacaaccatgtttgtgcagttgtctatcttgccctagttgagtatgctctgaaatgcccttgaatgtatttcctcctttacattgtggtgccttgggttcacatgtgtactctatcacctgaactattgcagcagtctttttttttttttgatatcaccaaaaaaaacttccttttagttaatctattgaactgccagcacagttctcctagaaaacaaattagaatgtgttactaccctccttaagaaccttacccgtagcctgttgaatgaagttctgagtttaatggggcacacaaggctattggcaatctgaatctacaccatcttaagatacatgggaagtcattactgtaacttgtcaagtttgataaatgcagccaaatcacagcaaacatgcccagagttaggaggtatatattttggtgtccatttttgccacacactggccctcaaactttggtgagactatcgatgtatagaactcagcatctttccctgtttggaagaaagaacaagaagaaatacagcttagaaataagtggaaggggccaggtgcagtggctcactcctgtaatcccagcagtttgggagtccgaggcgggcagatcatgaggtcaggagtttgagaccagcctgaccaacatggtgaaaccccgtctctagtaaaaatacaaaaattagctgggcgtggtggcaggtgcctgtaatccaagttactcaggaggctgaggcaggagaatcgctttaacctgggaggcggaggttgcagtgagccaagatcatgcaactgtactccagccttggtgacaaagcaagactctgtctcaaaaaaaaaaaaaaaaaaaaaaaaaaggaagacatttaaggaaggagtgatgtaagacactggaaaacatttgtacttttgtatgaaaatgctgtagcagaaggcttaatcaccccatttgtcattcagacctcaattcccctgtccctcagagaacttacctggaacccttagatggagacatattccttcttctcctctcctctggcactgtgtgccattcctctgtaacccttctcacctgtgtaaacacgtatgtgcatttttgtgactatttgcttgtctgattcccaactctgccatgaatactttgcaggcaaggtcttgtccagttttctcagtgcatgtctacagggctgggcctggcatgtggtaggtgatgaatttccaggtgggtgaccattgggttgactgactgagaaaataatcaaacagttgatgtgtgtaggcagtggggaaatgggaagcacataaggcctgtgtggaaggatattttcctcttccctccagggctggccaccttttcagggtccctttacctttcttctggttccactgaagaggccatgggcttctagaagtgtaggcttttctctgctttgcccatatcaagctgggggggctttgggatggcatgtcacgctatgctaccacctgcgtctgtggagtcttctagccagtgtgcatctgttttgtttcccattgtgttctgggtgctctgaagggttttgtgtagacttgtaccactcagtatggttgctattaaccacatgtggctactgagcactcaggttgtggctagtctgtattgacatgagctgtaactgcaatagacacatgggattttgaagagttaatataaaaaatactaaaacatcttgattttatattggttacatgttgaaatgataatattctaggtatcttgaattaaataaaatatatgattaaaattatttttacctggttgtatatttttctaacatggcttttaaaatattaagttatgtatgtgacttacacatttctgttgactagctctggtccagaaactacatttcttacatcatgaattcatttatctgcatttcatttgttcaggcacatatgaaaatgaacactttcaagcagtgtatgaaatgaccactgttaccaaaccagcgagaacacagactttaaggactgtcattttattctcctagtctggtaggcagtcataacttctgttagatggtttgaaacgtttacagatgcttcatgattttctttgagcagtcctgaggctgggacaaaagatggagcatctttgggctggaaatccatggcatgttccccacgacgagatcctatcgttctggccttttctttctgagactttctgcatttcatcctttgaagtggtaatagctacggacaacattcaggaagcagtgatctttgccagtgagttgtgtgactttgacagcgagctgagtttggaaaatgtgttgactttgtcccagctgtgtgattgtgggcagctctgagcattcgttaaactttctaagtcctttaggtcatatggaactctccaagtctatttcagatcacatcaacagtttctcctctggcctgacatgagcacatggggcatgtccattcaaagggagttcatgtgaaagttacagtggctttccaatcagctggtgatgatgctgtctgctgtatccccagccactctgctggagttgctactgtaatggttcagtgactaattggtgtttacctacagagtctgtaaatacattcccattcttggtattgaacatattaaaattgccatgtaatctttgtagcttattctctctactatctgcttaaaggcagagaaggatttgcaaatatgattacattttcaaaatgaaagtgtttcttttacggttgtgtactaacaattctttatcatttgcgtactaagtttaacacactctaacagaccagcataaatttaggcagagcagggaatatttctatctagaaaactgtgctttcaggcagctaactgcatggatgagttccaggttttatctactttgctatttggaccgggggatggtaaaacagtgtatgaggaaagtttcttactgtctttcacttggtgagagaaaattagtattgctggtcccagtttgcttttttctgcttgctctttagtgggaaagtgttaattttgaaattgcatctgtaaattatagtcatgtgaattttgtgctctgctggaatttctatgtgttggcctggagtctgtctggagcacagcaggcaaagcagttgggtgtggctgaacatgggagtgtgtggagagtgggcagagtgagggtggaaggggcagggcagcagctcctggggacttctctgagtgtactgctaagtaactggcactctgcatttaagaattttggggctggcatggtggtaatggtggtatgatcacattaatagttttgaaatgtcatacaacctctatggtagccaagtagaggatgaaattgaagggagtgaaattgtaggcctggagacatattggaagctattccaataattgaggcaagaaatagagagggccgagacatagcagaggcatgggaggagagaagggattggatctgagagagtctgaaaaggatgaattgactgataggatttagacctggcacttacttccagaaagtttccccaatgtctggccaggtgaaggagaggagtgggattgtggggtcattgggaatggggaggaaaagcaggctaggaggaaaagatgctctgtttggggtcttcagaggcagagtgttgaggtcaagaaggcagagacggcaggaccatagtggtgcggaaatgcctaatgaggcaagtgcagtcctgtttgctttagaaaaaatttgctcaatgaccttctttctctcagaatctgaaaaatatccacttttaatcaaataagaaatatatcattcagaaaatggcaaccacaaaaagcttctcagagaataaggtgcaagtgaatctacttagaatacacaagtattctcactggagtacgatgtgatgatgagaggggtgggccagagactggtcattcttgcccatcaaacctgtatcaacctgaagaaagagagtctggcaaatgtccaggtgcccatcaagatgcagactaggatcacctcttttaaagatgcctttgaacccctctagctccctctgcccacgaaggggtgcaactggccttgctgtctcccctgggcttcagatgttgcttgtcatactagtctgtgttttccctcagtacccttcattgttatggtctttcctaatagactgttggttttttgagagcaggaagcattgtatcctcattttgctccctgaagcttttggagtgtgtgtctggtgtatctagcacagaatgaagtgttcagtaaatacaagaaacttatagaaagggtagtgaagtggaaagagcaataaccaggacagaagaaaagggacctggtactaaccctgctactattagttgtttaacctggagcaagccagtttttctgggccatggtattctgataggcaaaggaagagatttagtgagaatctggaaagtccataaatggtccttcagaggtccctggatttcttgatattagatgcagactttatatgtgtttttgtgtgtgtatgtgtgtatgtgtgtgtgtagataggtgggtttaattttttgagtaaatgagtgatagctttcatcatactctcaaagggatctataacaaaataataaccactgaataaaacatgatatctctagaatttgtaagatagagttgtggggcctgggtataggcattcagctaaaggacttgtctggaaattgctatgaacaaacacaccctagttacacagatttttgtgtttatttggagtagagaggtgtggcttctctgagcccatcctgtgtactatcctttcttagaactctttcagttctatgtgaggtcacactcacattttgttttctgaagtactttacaaagaccaaatctgactttaccgatgatgatgaggatgatgacaatgacaacaaaggtgatgatgacgttagaaatagcagcagaagtataggacattcttctatgtgcatatatctgtctgtctgtcacctctttaacgctgaaagtaaacttgtttgataagtgatgttttaattgtaatttcgtaggtaagggaactaaggcacagagccttgatcatcttgactcccgtccttaccttgctagtaagagatggagctggtctttgaacccagaaaatctgacttctgagcctgcacttctaatcagcccagtatatggctttttttttaaaggaagttcttgttctctgtagtttcacttttgaagattcaaaaaatagtaagtatagaatacttcttaaatttatgattgttaccaaggacagcacaaactataatttggatccatttaacctatatagatactctactctcttgaacaatggaaatgtatttcccatagtttacagtcttcctgacatagaaatgttttgttgatcttatctggctgtactgctttgctttgcccatagaggaggtgctaaggacatttttcaacagcatcccacagatcaaagcaacaagcaggtgcttcaggaaatccctaagatgtgttgctggaagtgacactaagctgtagtgtatcctaatgggggtaatttactgtgtgaaattagagtttcgaagaaaattatgataatgagttctgttgatttcctgggagagttaaggtgaaacatgttgttagtctgaaatttaccatctggtctggtttagaattagacctaattgtcagataacctggtgtctgggatgcctggatagtatcaggtctctggggtgcctctagcttgcagttgacctggtctacagactatgcttctgtctgaatttctccacccagcactcatgcccacactcccagttccctcttctggggcccaagtttttctccacaaccccacagggcacttgctctgatccttcagaaaccaggatgcaacatctgtgccttgagcctctgctgctagatagcaacctaatgttgtaggggtgtgatgccgtggaccccttcttgaacccccaagctcgtcttgcatttggggctctagcatgcagctgcctgattgcccttgcagagcccacctccctgtaagtaccctttccctcggaattccttttgaacccaggttgttgttactgaacccggcctttccttttgggtctggtatgggttaagtggtgagatttcagaatagagaactcaagaagataaatccataattaattagcaactttttggcagacctacatgttggtctcatggcttcctctggttactgtggctgtgcctttcttaactcaggaccttaaaggtagccataacatactgctcctgcttagatgacttgttttaattacaaataacatcaacagcactaatgtgctagagaagcaaagagtggacatttgcccgaatgtctcatgaagagaatagtttaaaatgggtagttttatcagtgtacaatatcaccagtctgttttcaaaagctgttttattttgtggtttttaaattaactaagggatgaaaaaaataaagagctaaaacaaaataaaaatcatcattggttgaaaatgtttcataggggaacatgtcagtatgtttgttggctctaggtttgagtaaatagacaacactgtctcatatttaatgtttaattttcacaatggattcttcaactattcattctccacttgtgccaggttgagccctttacatatctggacacctattatccctaatctttaaaacaatttagcaaggtattactcttttatttgtttaagccagaaatatttttgtgttaagtggttgctgtgagcctgtctgtgaactaggtgatggaaatacaacagtgaagaatcactttgattctactgcccttaagaaattttccgttgtcagattgaaagaccaatgaacagatcactggcacggcttatgtttttatatactcttcaggggtgtctaaatttatgcagatatttttcatattgaagcaatatttatgcaaatatattgaatatcatgccttttgtcctagtcatcccatttaaaaatctttcctatagcaaaatctgcacataattgaaaagatctttggcgagaaaaataattgcagattttgcagaaaaatgttgaaaaagctcattgacaagagaatggctaaatcattgctgtttatatacactgaaatgttacacagcactaaaatgaataaagtagatgtatacatatgacatgactctgctttattgttaatgacaaaagcatgctgtagaaaaatctgtataataggaatacattacttaataaagcaaaggaaaaaagaaaaactctgccagagtcataccagatttttagctatggtcccatttaggcagaagagagaggagaggtgtgaagggcatcttttatgtattactgtattatttcagcctgacaaagtaaacatgtattcttttgaaatatatatatatatatatttgagatagggtcttgctctgtcacccaggctggagtgcagtggcactatctcagctcactgcaagccccacctcccaggttcacaccattctcctgcctcagcctcccaagtagctgggactacaggtgcccgccaccatgcctggctaattttttttttttttttttgtatttttagtagagatagggtttcactgtgttggccaggatggtctcgatctcctgatctcgtgatctgcccgcctcagcctcccaaagtgctgggattacaggcgtgagccaccaggcctggcctgaaatatttttaaaagccaataaattttcattttaaatgaggtgatagatgctacggtggagttatgtccggggtcctatggggacacaaaggggacacagaccatgggccagagaaggctccgtggaggagtgggtggcctcactgggttcaggatggtacatgtccaccatgtagaagacacagagagaacaagggcttcttgcttggaagcatcctggaggcttttctggtaggcggccttggggctgtccacctccagagccttaacagctagcccaggtcatcctgggttcttcttcccttagccctcacagagcatcagctactattcctgaacactcctcccatttccactactttcctgtctactgcagccatcttggttccagtgcctcacctctcacttgggtggttgagacagccccctcagttggtctcctggccccttctctgttccctatgtcctctaccccagtctgcccttcactttgctttaaaaaggcagttttgaccctgtgattgtcctttccacactttctcaatggtccttcctagcttctggaatataagccacccttctaaagcagatttgcagaaccctttgtctacctttcccacctgcctcacaaagtagctcttatttatgctatccaggatgattttcatttctttacagatgccactcttcttactcaccaaaggatagacaaagggaaagaaagaaaattcatgacatggatttactctagttgattgttggcctattgacctgcaggtattgttactagctatgtctgtttctgggagttaatgtatctcagaatttcctattattttgtggtaacaagttagaaattaatatattgcaggaaaacagtcttcttagtgtccttggagatgttttcttttgtaaaaattcttgaatggatgtttccagtggcaggtcagaatccccacaaagaggatttaagaatctggcattagtttgtatacttgtctattccaaatccggatacgcttcgcctttatagaatacacattgttctaaaaacaccgcattgactaaacagtctttatttgctttggctaaacttagagttaacggatggactcagtgtacaatagcatagacacaaaactgagtgccagttctcactcactttgggatacactgcatgctgtctttccattcctcctcatttgctgcatttgtatatttgttatttttctgttagtgaatagtaataaataactcctgttaagcagaaaataggagttggtctcagcttgttgattttcagaaatgtttgtccttataaaacacattcaattcaggactaaactaatagactatcatctggctccctctggtggacactcatgaaaaaaatcaagctatagttttctgaaagaggcggtgtgtaggggaggggttgtcatttttctggtttttggtgggggaaaaggaatagaaaatgcattctgattttgtagatacatcatagttattatagaaaatatcctcaaggagtaaaatgcattgctatataaaatacataatagaatagcaataataaaagacataaccgtagtactgctattgctatttttcttgttattaagtagtgatatatgctgggaccacagtgtaaagtagaatcagaggcagatttcaccccatagctttctaacagtgatatattaggataagatgcatgctaaagtaaagcaatgtagttaattcaagggtctggatactgtactgattattccagaacctccccaaagttagacttttcgcttaatagtgaataattttggtattttagcaagtgactatttttattttgaattagttatttttgataaatttattagtatttgttcattcttgatcttctgagtttacaaactcactgacaatgttttatctttattatggggaattaatcaatatcaagttttatctgattggttgtatatgttttgacattagatgttcgacatagttgaccaggaagaaattgcatgaagggtttcaattgtattttcttttctttttctagtctcacagcagggggctacggttagaatatacaattttggggtcagtaaattagctcatctagtcaccatgtcctttgcttctttctaaccctttagaactatcctaaagagttttgctcccttctcttttgtttatgtaacaaattttcttaattttttaaaaattaacaaataaaaattatatgtattgatctgtgcaacatgttggtttgaaatatgtatacattgtggaatggttaactggagctaattaacatatgtattgcatcacatcttttttattttattgtggtgagaacgcttaaaatgtaacctttttgcagttttcaagaatgtaatacattgtcgtcatctatatgtaattcaattaaatgttatctttgtataataactttattttacatgataataaaaattcacatttactgagttaagcatatgataggcatgatctcatttaattcttttagtaactccatgaagcagttagctattatctgcattttacagaggctagtaaaggtgagcatagctgaaaacttgtgagtcagggctccaggtattcttactccaaagccaggagtttctaactacaaccatatatatatatggtaccagttcctgaagtgggtgagatataagtgtatgtgtggctggtactctcatgaaccttctacagagtactggagagacttcatttttatgttcctgtctctgaagtaaggaattagattaccttaatttagaaacagatttttgccttttctcgctttttactatcattctgaataagcctcatgtagaacctctttaagttgtgtttgttaaaattttgagagttaggatgcattatatctattatcataaaaataaactttatggccgggcacagtggttcacacctgtaatcccagcactttgggaggccaaggcaggtgggtcacttgaggccaggagtccgagaccagcctggccgacatagcgaaactgcatctctactaaaaatacaaacattagccaggcatggtggtgtgtgcctgtaatcccagctacttgagaggctgaggcatgacaatcacttgaacctgggaggcagaggttgtagtgagccaagatcgcaccactgtactccagcctgcacaacagagtgagactctgtctcaaaaaagaaacaaacaagaatagactttatgagaaaaatacattttagataaatggctttctcactaagtcttcgaaagagacaatcttaggacaaaagattgaaggaagggtaaagttgctagcagagtatatttaacatttagatttaagtactgaagatctttataaggaatctttgaaacataattaaggttaatttagaaaactttttctgaaaacactcagaattaaattaaggcaatttccttaaagttggtgattatacagaatagctactatttaaatagtttacgtgctagcttatttaatcctcacgataatgtaatgattgttaataatctaactattattataggcattatctagaagatgaaacaaaagctcagagaagttaagtattttgcccaaaagtacttggccaataaatggtaagctgaggatttagactcaggtggtctggcccaagagcccgcccacagtctcacctgctttgctatatagcaggactgtccaatagaactttctgtgatgatggaaattttttgataactgtgtagttcattacagtggccacatgtgtgtggctactgaacacttaaaatgtggctagtgcaactgcagaactgggatttttgtttttaaaatttaaattaatttaaatagcctcatgtggctagtgggtactatactggagaatacagctttccagaatctttcagattctgtaaaagtagagatacaagttgcttggggccacccaggctaactttgtgttatactgatatagaatctgcaactcaaatgggttagtaatctacttaaagtaataaagtaatttattactttaagtaataattataaaattataatccaggtgtttatacttcccaatcacagcccttctcattctgcacatctttgacacctgcaaatttatgtttctgctgctatggttaatattagattgaaaaaattttggaaaaagaaatcttatattttctgaactacatatctaattagtattttcctcttttctcaggttatagaaacattatcacgactttctcgaacacctatagcattggccacaggaatcaggtaagctctgttttcgttgttcatgtgtcccattgagttcagtgtaatgattctttattaaatggttactatttgtgaagcatcttgcacacaggtactatgtctcattcatgaagagtgcctggtatgtaagtatcccgtacacgtttgaaattaattgagcaaggtagaacttattgatagagttgaataacacattggctaaacattgttctcaattcacaggtgactgtcactggtgtggttcttctttttttttttttttaactttcctccaacatttctgtacatatgattcattaaagtaaacacaaatgcttaagtaaataaatatttataagatgttgtaatatgtttatttcctatagagtagatcataataactcatagcttttaggagtttaagaaataatcaaacaagtataaaacatgtgtacaagaatgtgtattgaaggttcagtagtaaattaaaaacctggaagtaaattggttaaatatagtatgtcatctccttgcaatagagtattatgcagttgataagcataaaaatatagatgtgtatgttgtgttgagccttttctgtttcagatactacatacttaagttagatcagtcagcaaagatgtattatataagtaacattaggaaataaagcaaaacagtctctactcagcctggtttcatggaaatggatcaaatttgttttttaccttctttattcagtgctccatatttctgtctctggccatcacagccatttttctgtgtccagctcacattcacattctaagggagagaggatccaagcaggacttagtggggttctctgcactggctacaaagcacagtgagctcaggaaaaatgccctgctggtacaggacctttctcagaaatgggccatgaatttggcagctttctatgtatatggtctgtcggctggataaatgtttaactcctaatttgctcttcaatacatgcatacctttcatgtcaatatatattttatgttattatatgtaaagatttttttaaagcatgatcaaatttttatgtattgattctgaaaaaacgtaagtcaaaatttttctcctttttttctcatctatattttctacaatgaacttgcataataaaatgtgccttaatttataaaaaatgattatgagactacatttctcacacactgatttatttgaaaaacctagtctcctcaaatgtcttcagtattaaattaatccataagtcaatgtgaaactctgcttttaatataactagtaattatttaaagcttatttattattttgatggatcctctggtttttatgaaacatgtgatatgctggctgcctgaaaagagtagaatttttggcacagtatgcttactgtgattttgttagacataaatttaaggcagttatgaaaaaaggacatagtaccatgatgcaaacaaggaagccacacagtgggaataggagatacattaaaggtgattttcttgaatagggaacaaagaaaacactctattcaccccaaggtctggttgactcatttgtctaataaacgaaaataaaacatacagcttaaataccctaaagtctgagcagaaatgtcagggtcaatgaccgtatatgtaaagggcacaatgtttttgtcttctactagttttcatctacactagtgaacggagccatggaaggatgattgctaccaaattatttgttatcagatcccacagctgaaaagagagggtgctgaaggcaagggtacatgcacagctgtttgttgtctgacttggggtgctgcagtgggtgaggtgaccctgcaggtatgtggcaggtgggagatcagataagcacgttattatgaccccctgcacatgtgactgtggtgaccagctgtaattgcttcagatgatttcaggtggcaggtgttacagcctccctaggggaaccccagacaaagccactgagcaggcactttagggaaagccctagatattgttagacatggtgactgatctgaccattttggcagcagacaacttacatatttagtgagggttaagtgcgcagcctgattgttgctcgttcactcatgggtttgtttttttgtttttgttttttctcctcttcctaggcccttcccaacagaagaaagcattaatgatgaagacatctacaaaggccttcctgatttaatagagtatgttgaaaatttcaagcaaaatttagccactgccaatttatgtgtccattgtgggttttaactgtggatgttaaagtaagctatctgaaggaggaaaagtggcttaattactgattaaccttaaactggcgatggaaagctttacaagaaaatgtacttcaactggtttttagttcctgttttgtgtccccatgaagaataaagaaacttactctaatgaagtaaaatttcaaagtttctcaaaggcataacagaagtagtagataaaactggagttagggaacaatttaaaagaaatagaatctgctgctggagttgtgggacacatagtgcatgccttataagttcaaggaagggagagataagtgtgggttggagctattcgggatgttttagtaggcggtgtttgttctgaacagagaatctttttgggctctattatttaatagtcaagagaggcaaaaggtccttgcagccgattatcttctgctgattgagtgacttgtacagattacaaataaatatatgcgtgatcgttactcctcaaggaactgatgacatggatcaggcatgtttgcaaagaatcataataagaaatagattatgccccaagacagattcaaatgctatggaacttcatccattcattcatctatccttcctcatacacccaacacactgggcttgttttagccttgtgacctttacacctgctattctttctgcctgtttgactgatccctcagcgttcaagtttttgcttagatttccctacagagaggccttctctgactatcctgtctaaaattgccaccacccccttacattgctgtgtttttacagcatttgccaatgcctgagacagtcttggtttgcttcatttattgtttgtctcctcattagaaggtacacttttgtgaggtgtgggactttgccttgttcatggctgtattcctagaacttcacagtgtctggcatatagtaggtactcaataagtatttgttttccaaattaataagtcaaaactgcatctagcatctactgtttgccaggtattacacctggcaataataataagagcttactgagtttccatttgtgtgctaaccaggttatatgcactatcttatgtaataccacaatattactaggttgttattatatcttcacagtttaaaagtgagaaaactgaattttgaaaagcctagttacttgctgagggtaatattgctagtaaattgtagtctttggatttgaactcagacacctcttattctagagcagaggttgttagtcacagccccaacttccagatccctctcagagcttttagtagaagagtagagggggtgagcacacccactgcagtcacacgatggatggccagcagctctttccagggtaggtggccttgagaatgatctttcagtcttatattttaaatatctattaagagtagtttcttatctcttaaaatctctaagaactcaccaacagtaagcaagatagtgccagttgttttattgaattggttgtaatcttcataaagtgactaagattattggtaatgtactcagattgtttaaggggaatatttaatttctagtgccgtgatgctattctttttttttttttttttttttttttttgtgactgagtcttgctctggcacccaggctagagtgcgatggcacgatctcagctcactgcaacctccacctcctgggttcaagtgattctcctgcctcagcctcccaagtagctgggattacaggtgcctgccactgcgcccagttaattttttatttttagtagagacagggtttcactgtggtagccaggatggtctcgaactcctgacctcatgatccacctgccttggtgtcccaacgtgctgggactacaggtgtgaaccactgtgcccagtcgatattcttttttaacccataccagtggtgacttacacctataaatttttatagcttccccattttgttcttttcactgttatttaggcagacatgatgtcaggataaatccagtgaggatgcattcctagctaaatttggagaaaaccttggtttcctgaattggctgctctgagatgccagcccttgctctgtgagaggcagtctgctttaaatttctacctggtggccgaaggtccgaatgtatttgcaggattaaagaaattatttatttaatatgcccaggctggtctccaactcctgggctcaagcaatccacccaccttggcctcccaaagttctgggataaaaggtgaagtagggttatcttaaaaaaaaaaaaaaagcaaatgtattatccctagacatgcttggttttgagtttgctgtgacagcttgatttttattctcagctttattacaatttctatgggtaaatatacttaactctaaattttggggctgcattcacccaaacggaagcccttggaataaatactggcctggtccccactgtggaggcaatcattgtttcctaagttggggagaaagccacaggatggagtggagagggcaggtaatggctacactgtacagtgtccttttagtatcagggcgccagacatgcccgtatgtaggtggccttacatgtcgattgtttttgatttattgaccatttgaaaaatatcacagcttttttctttcctggctcagaaatcaggaattgttgactaagctgttagcaagaaaagcagctttagtaaaggattgaataacaaaagccaaacagttctagaccagtcttgtgtgtgtgtttgcgtttgtgcacttgcatgcacgcatgcactcacacatgcatgtcattcttacaggtcttaaaatagagaaaagtcagccaggcgcggtggctcatgcctgtaatcctaacattttgggaggctgaggtgggcagatcacctgaggtcaggagtttgagaccagcctggccaacatggtgaaaccctgtctctactaaaaatacaaaaattaactgggcatggtggtgcgtgcctgtaattccagctacccaggaggctgaggcagaagaatcgctggaacccaggaggtggaggctgcagtgagccaagactgcaccaccgtactccagcctgggcaacagagtgagactctgtcccccaaacaacaacaacagcaaaaatagagaaaagtctgtgctaatttatatgattcattcctttactgtcatgggaaatagtgaaatgtaggacttcagcaaggttgacttttttgcaggggtggtgatgttagggatgacaagcaggagttctgggattaggagtgccagggaaatgaatttcagtccattttgcttccaaacaggatcccctccaatgcagaacctgttttttcatcattttatatctcagctccttcatgaactcaccagaccttcctatcctttgatgtggtacagagaatgtgcaaaccgatttacctgccctaatgttctctggccagattgccgcctaaacccctcagtatggaaattatgttactgccaatatggatcaccatctccctggtgtcccaaagtagaaagctccttcctcttccttcctcctccctcccttattctcagtgttcaccaagtctggttgtcccagtctcctatctctgtctgttcctctcctcatctgtctttatgttagttatggccctgaatataaaacagataaaggaagggtctggttgatgggggactggtgggtttcctctgaatgggcttgaaagagcatgggttgaaaaccactggattagatgctgattataacactgcagtaactgatgcttttataagaccacttatgacatattagatacaatttaactctcctatcttctccatattatacccattaatacagttgatgaaactgaggtcttgaaatatgaaaagtgggaggcagtatgatagagtgggtaaaacactcagcgttaagacagacttggttttaaatattggatctgccagtgactacctgggttatttgtaaagtcaaatagccttttggtctttcaacttcctcatctctttaatggattaaataataatgcacacctgatcattaatgttggatgaattatgtaagataatatatgtagaataattatttttgtgcttatacatagtaactacccagtaaatgatggctgccactgccctcgttattggattctgtagttgtcattgtacctattaagagggacaaagttgtaatgtaaaccttttgaactctttccactaattccattttatttcctttctggattttttactaaaatccagtaggctatttgtagctattgcatttactgcataatagaaaatgaccttatatgatatcctttgttgtagtgaaacccttgtggaagatgaagaagatctctatgactgtgtttatggggaagatgaaggtggagaagtctatgaggacttaatgaaggcagaggaagcacatcagcccgtaggacttttacttgtttttaaagttactctgaatattttattaggaaaggctaattaacataataatttatgtaacatctgctgggattttttttaacctttgcttgcttataactatataattatgacttgttactgcatttggagacatatgcatgacctttcagagttcaaaacaaccatagggaatcttttgtctagtcttttcatttcgctagtaaggaaacaaagtctgagagagaaatgaagtgccacccagttaaataatggcagggtggtagtagaatagaattttagggaatcatgaaattatactcttataaaagtaaatttcttacaacacaggtaaatttttccctttaaatttgatataagataaaatatatattaaagagtatttcttcacatttgttaagtgttaatatgaggtaccatttttcttttgtttcatggtaagtctcctggctttcctactcatttataaatttagtttcagatattgtcatagccaatatgagccctcaaaaccttatctgctattaatatatccagaacattcagaaaggattactttggattattttctcatttacaatttgaaacaacaacagaaaaagtcagttgcttaggttcttaataactttttcttgtatattaaagacttttctttaccagctgcttggtaatttttgtttccacagtgctttgatgaatgcgcttagctctctctatgttcctactgttaataaaaggctgatgggctgtccagtagcttctgtggaatggaaacaagttacctgcctgtgtttgaggaatataacgcaagtgtggtttaaccattgcataggctgacagcccatctgtggcagcattttcagaacatttttaggtgaccgaatatcatctgtgcctcctgtaattgttaactgcattgagtgctagtgcattcttcactgtctcccgcaagggcagtcctcactcagctgatggggtgaacagtgataataatttagatgggtaggactcttcttgcgcacttggaaaagtgctaagtgctttatactgtttatcttatttaccattccttggggttggtactgtaattctctctgtttgacagataagaaaactgagtcagagaaatttagtgattcattcacagttagaaaagctaacaacaggccgggcgcggtagctcgcgcttgtaatcccagcactctgagaggccgaggcaggcagatcatgaggtcaggagatcaagaccatcctggctaacacggtgaaacctcgtctctactaaaaaacacaaaaaattagctgggcgtggcggcgggcacctgtagtcacagctacttgggaagctgaggcaggagaatggcgtgaacccaggaggcagaggttgcagtgagccgagatcgcgccactgctgtccagcctgggcgacagagcgagactctgactcaaaaaaaaaaaaaaaaagctgacaagaaaactggtgttgaacccaattccatcagattccagaatctttgattttagtgttgtgctctatgacttccaatcttaaatacttagttaaaaagtcaagcagtaagatgttaatgttggaaaaaatatttgaaggtctttacttactttgccaaatacctttttattgtttttgcagttatttctatagtatttgttaagtgtgctgtacattaaggaaataatcatacaccatttatggtgtttccaactttatgaacattttagtaagagatattttagagtgtctacattcagaggcttattttttaatcatctaaatctttgtcattacattgttcacgatttttataaaaacagcaaagatgcctcacaaatgcagttagatgtctttcaattatgtgttgtattagaaaggaaagtttaagaaagtcagcaatgcttttgatctctacttcccgataggttaatatatgattttattaaatcattttattttgataattctaactgcagaaatgtccagaaaatgatatacgaagttgttgtctagcagaaattaagcagacagaagaaaaatatacagaaactttggagtcaatagaaaaggtaagtcatcaggtattatttttgatgcccaaatactgcctaatatagttaatatattagactcactgtttcttctgaaggtgtgtatgtgtattataatttttaggagaactttgtacttaaagatctcaaagcagatttattcattttacaactatttatggatgtcttagtacctgagtggcactgtttcagggactaaggatatagtaataaatacaacagtattctgattctcatgacactttttcccatgggaggattagaatgtaagcaaataaatatgccagatggtcataagttttctgaagaaaaataaggcaggggcataagatagagagtgatggggggggagggctggtggcattttataaagagtggtagcagaagccctctgtgacaagattaagtgggcagctaagtgaactgagggtataagccgtgtacatatgccaatgaagatcattcccgagagagcccctctgattggaaagtgttcagcatgtgcttcaagggcagcagcagtccagtgtggctggagcagaatgagggaaggggactgagcatgaggtgggagagctggtgggcttctaggccatgcaaggacattgggaagggttgtgagcagaagtgacatgatgtgatttaagtctttaacctctcattctggctcttctgaggcaagagtggtaactaagagaagaattagaagaaaattgtgttaatcgagatgacaaaaatggtggtataggtggtcagattctgagtaaattttaaacatagaaccaaccggattggatgatgaattaagtaaaggatgtgaaaaaaagagaggagtcaaggatgactgtaggttttggcatgagaaactgcatgaatggtgaagattacaggggtggggaaggacaggcttgggaatcaggagtctgttggaacaagtgaaatttgtgatacctattagactttgaatgggatttgttgagaaaggtgttaggtatatgaatcaggcattaaggggaaagactgaattgacaaatagattgggccattatcatcacacaatggcattaaggccctgggactaagtgagatcaccctagtgaatgcatgttagggaagaggtttgaggccagctctccagactctcacatttagaggttagggaaagaagtgaaagtatgcaagcattatttagaagagtagaagagtagattgactagggaactgtagtagcactatgtagcgttacaggcccagttgagttttgtggtcatattgaaaattagacgatcggtaatgtccatgcttaacttcttagatagagtcacaaaatatgtggcaagttagacttgatcagggtgtttgtttttctagaaaagcacaatggaagaagagaaggtaaggggatttacagggaagtgattcatggagtataaactcggttaggagggaaatgaggatatgatggaggtgggatggttagtggactggctgacccaattccttgaaattagtgctatgaagcatatgaagttgttgataatgacaaggtctgtgagtatggccataagatttaggagttgagctagagtggagcacaagattatttgtggtcaaggaactgagagaccagtactagaaggatcctctgcacagatactgagaatgccgagaatgaaagagatatggtaggccagaaactaaaattctcaaggaataattcataaattgcatacatagattattgatctcagggatctagaatctccacaaaacatttgggagatattactgtgtaagtcttcatatacatctccaaaatgttgccattttttggcaactcagacaataatgttcttttcttccttccttttggaagcatttattgtctaaaccattttattttatactttaaatgtattaatattagctcgtatttatgtttttatatatctattcaagtgtaaagtctttaagttagagaaaatagtttctacaattttggtgtttataatgctgatcaacaattgactttcaaaacgtatttgttgtttgttgatgaaaaactattatatagattaggacaagttatacttaattactattttcttcttctttcctggtagtatttcatggcaccactaaaaagatttctgacagcagcagaatttgattcagtattcatcaacattcctgtgagtaaaaatatgctagctaaaattgtggtgtacttcaataaaatcttcatttccttagggggttccagatccctattttaatactcttttgtattatttaagaatattggccttatttatttattttttgcttttccagtttttatatccttattttcttgaaataactgatgtatcatatcttcaaccaaaagtcagtcaacatgtacgaagaacacaaatggaaaaataactttcatgtgttattcttaactctttgtcatgaagaggtagtctcaaataatctggggatccacttccatccccacacttccctgcggagctctgttgctcttccagaccctcagaccttgtcttgtaggtgatgtcctcaccatatcagtttcccctactttcctccattcctccacatctttgacttctactatttggtgctttctacttccagttgtatcatatgtaactcccatttatgaaataccctacttccttatgatttaccagactattttaattgtaaaatttgaggagatatttttcgtttacatttatgtaagcatttcaagtttcagggcaccttaccagaatcttacaatcttaaaaggatatttgcccagaaatctagaagcaagctaaatgtcatgccaagtgaggtaatgctaggcaagattcaagttctcagacctctaggacttgctttggtttatacatccccacccccatgcacgcatgtacacatacactgataaatgtatataagcttttattcacagacctgcttgtattacctgaacagttctttgtgttttgattctattgtgttctgtgttgctgagtagcagttggtaagcaatggcatgtcatccttgtccctgattttggccgaatgaggacattcttgttgatttataacatgcacaatatcagctgaaggtttagcactaaataaactgcacatttggggaagataaggatcttgaaccacttaagtatggtctttataacttagagcccacatcttcatgtttactttctacaccactaaggagagagcatgctgtggagtcaatgtgtgctccaaggtacacaggatgagataatgggagaattggcacctagttcaagttgcctcatatcctggctatgacatgtatttactgcctgactgaaaattagttgcttatcgggaaaaatgtgaaattctgacattttgagttgctctggtaaactgtcgaatacaatttatttgctccttatttatgccattagttgcctgatttcaagtaatttagtctgattattgttagcttagcaccaggacaccactaattgaccaaagtacaaatttacatgtttgtgtcacaaggacatgagtcattattttatcctgtcaataaaacattaggcacttggacagttttatttaaaaaatttacagtgattataaaacaaaaataagctatacatatttttacacaaggaataaattatcctttaataactagtgagataatttcttttttcacaggatgctgacatttcaactgagatctgaaattgctgtttcccatctgcatggcctgtctccttctcttctcctccctctcctctgccttccccttatcttccttcttttttctcctttccttcccctgctctccctcctcctcttctaccctgtcctctcccgctgcttcctccccttcctccccctttctctccccactctccttttccctctctctttattggtggaagcagttttatatattgagagcattcagcatatcctgagtggcaagtctagcaactaaaaggattctgggtttggggtgtattttttggttgttattcctactttcctttcacattgttttcttttcttaggaacttgtaaaacttcatcggaacctaatgcaagagattcatgattccattgtaaataaaaatgaccagaacttgtaccaagtttttattaactacaaggaaaggtaacttttgaagtttaagttttgtgggtcttagcttgtaattatagtgaggattagtattaaaatagctaacaaatagctattactgctgtttattacattactacctgagcagtaattagaacgtgggacaattactttcagagtagtagtttgagttctatatatgtaattaaaaaagaaaaaaagaagaagaagaaggaggagggggaaggacccagtatggtgcttatttttttgcatcgcaaatcaaaaggctaagtttcttttacaggctttatcattactgagcgatgtaatcttcagtaagtcattttaactctctgagcctctgtgtccccatctgtaaacaccggaggtagattagctggtacttaatgcttcttccacttttcttccaattctggtattttatgacactctattttggagtattagattcgcagagtcagtttccctttctaagttaaaaaaaaatctcctgacaacctataggaattggagtatcaagaaattttgcttaaaatataattatctctcttttcaaatcaagcaacgtatttcctagtactaagaagtggctaatgaattactttgcatcaagtcttcgataaatattcacattttattagtagtgtcttttttccagtggagagttaagagaagcaataaaccaactgacctctttgcaaaatatttgtgctacagagataccttccctgaagtgggtcagattccatgtgatatgagttatcttctgtccagaacagttcaggtctctcgttttcctctcttcagatgatttatgttccttaattaaaaagtagcaaggagtaagaggtttaataatgaaggagttatatgtagtgattggcataaaattgtaatagagaaaactttctgagtgtttagagacaaagtttatctcttgtaagagctttaacagaaatttttaattttgtttttggaatgcatttatgtctactcaaataacattaacagtcatcaagccagtttgtaaattctgcctgctataaaaatttacatagaattaatctcattcaaagttggaactacaaattagtcattactataaaaatgagtgacccttattctatgactgtgtatgtggtatgtattaaaaataatttctactgctattttggttatccctaacaatggttttaaagagatgaagattctgcttgtttccccctccagttcattcttggtttttgtcttagagatttcttgtcttttttccctttcagattggttatttacgggcagtactgcagtggagtggagtcagccatctctagtttagactacatttctaagacaaaagaagatgtcaaactgaaattagaggtgcctatttatttttagtttatgacataaagcaaaataaacctaaaagcaatgtgttcctctttatgatcagtgaagcagtacatttcccattattttaaatataatttcatgtcaattttataaaatatttaaacagctctataaaatagtaatatggtagtaatagtaacagtcgttaaaaatctaacatttatggccctgtgttttacatgcattatctcattaggtccttctgactctgtgaaataggtacaattaattttctcatcttatgagaaagctgaagttcagagagattatgaataacttgcgtagatagtaagaagtgcaggacgagtgagatacgttagataatgtatatgtagatttaaaatgtttactagttagctgggcagggtggctcatgcctgtagttctagctacctgagaagttgaggccaaggagtatgcacttgagcccgagagtttgaagctgcagtgagctatggttgcaccattgcactccagccagggtggcaaagcaagaccctgtatcaaaaacaaaataaaaaagatgtttactaaaaatatgacatttagaatcagatgtattaaaaggccatgcatattgcccacaggaaggaagagaagacgaacacaaatatggtaggattaaataacatgtgataagcactgtataatagggctctgtaagactgaatctacccacttcagtgtgggtagattgtagaggattcatctgaagaggcgcatttgagttaggtcaccaaagaatgggatgagctttgacagatgagattctatggagagcattcctgaacaattggtatgtattgaccagaacagttgggaaagtttgagaggtggcacgtaggccgatataaacagagtgcatgatcacaacagtatataagtctagaaacctaggttaagtcgtgtttttttgtacatcatgtttttttttttgttttgttttttgttttttgtttttttttttcctgaagaggagttcgaggacttcatgctttcaaagaacttttgaacaatgtttgttgtatcagtcactgtattatccatgtattttgaattttattaaatttcaggtagagatatatagccagctcttaaatttaacagcgtgtggcttatttgcctgtttaatatcccttttccttttctttgttcagtgtagcactgaggtcaggggagaaggggcaggtgattttcaaatcagaagcccttcactgttttgcctctctggcatgatttcatagctcacaactcccacaaagggaaactattgcttagacagtttgcacgttaacaggccaccaagtaactgtactagatacgtgatctttttgctttatatcttaatattccttcattatgttgactttaagactggaggtagtttgagtcacccctaaataacatccttgtaacattgttagtgcaaagacttcctgctcctctttgcagaatagagcctcctaagtgtagagctgggagccactgtgactcaaaatatgatgataaaattaaattttacaacttatacacctacttcctagtagggcaacattaaagcagtttttcttaaaataaagatataaaattgtgctcccagatagtagtcagcaagttgtcaatcacacctccattatattctcagtcttgtttgagtgttgttcttccttctttcagagttattgtcaaagttttgcccaatgaccatactctgggactctaagtatgtagtttttgcagtcaatgctcgacttagggaaagagaggacatcaggctgagtttgaaaggcacagggtgaggtgcccctgctgtcctttcttcagcttaaaagcccacacttctaaccatagtcctgatttggaagtattaagtcggatacttagtgtaacacttcaacaaatactcagtgggagctgcgtgccgcaagccccagcatgatagaaggaaaactaccttattcttggtgtctttctgccttctttgtgtcttctgttttgtggttatttttgttcttgttgagttttttgtctttttcttctctactttggaaccaagataacatggggtgaagggcgatgaatctctttatcttgccctatcagcctggctcatcctacctcattttattttccattacaattgaattgaggctaagcaagtgactggatgttttggaaggattctttctacccattatttactttcaacacgaataagcattttacatttgagtctctatctcccaggtgtagctaattccagcaatgttggtttctttacttcctgagcctgtaacttagaatgtaaaggaactgactttttttcttcaacattttgaaactaatttccataatatagtgaattttaaatatataatatttctgttcctaccactgtgttgggatggcataacataagaaatataagctacaaccttaattccaagggccttaaaatgcagcagaggagataagacctactaattatagtaatattaacaatgtaactttctgtttgagacccatgatccagagctctctacaatctgtagaagtaagaaactggttgaaatagttatccttctaatgaactgcagtaattgatgacacagctagcatgtcaggatgtgtccccaattcattttgactgatagctgtagacagacatactcattaagtcacggatcattagagttaatggtgtttttttggagctcctcataatatatcattccatgtgccagaaaaactaagtgtgggcaaagaagaaacaaacttgtgagcaacagtgtattttcttaagcacaactccgtctatgaactggaaaggtccttgtgctgggatgtgcaattgtgtcaggattttggacttatgaggttgctcactaataataatatttgtatggccctttttttttttttttttgaagaacaccatagttacgtgagaaacagtaaaatcagaaaagtgacttgtccaaggtcacaccgccaacagttgccaaatcttggctttaagttcattctttgacacttcaaagtaatttactcaaagtcataattattatcaaaagaacaaaccagtcaatactattttaaaataaacctttaggaaagaagagggtgaaattaaatacaatccaaggcttctaaatcttggagtttagtagtaggtttatacttgagcaaagttttaaagtcaaatattccatttcattcagttcagtaaatacttattaagcaaatactacattcttaggggcatacagcacaaatcatattggagtagatattacatatgataataattaaaagacccacaagacagagagagagtacacccaattgtgattgtaattgttacgaaaggcctaggattgtagttcttaaacaggaagatgtattttgctggaggctggacaaagcacatcatagttgagggaactgaataaaccatagttgagggtgggaagactattgacacttttgatgagtagggatgtgttcttgatgcctgttctataagtccactgggggaaattggtgggaagtacagcgataaagataaactgaagaagaccctggggggccatgattttgcactagagaaaataattttctttttcttttttctttttttttttttttttgagacggagtctcactctgtcacccaggctggagtgcagtgacaccatctcagctcactgcaagctccgcctcccgggttcactccattctcctgcctcagccttctgagtagctgggactacaggcacctgccaccatgaccggctaattttgtttttgtattttcagtagagatggggtttcaccatgttagccaggatggtcttgatctcctgaccttgtgatctgcccgcctcggcctcccaaagtgctgggattacaggcgtgagccaccgcgcccggccaagaaaataattttcatacacaaaatagttctcttttattcatgtttagagttaaagtactacaagatttgtttttttaaattgaagatactttctgttatttacagagaaggattgttaaggaaacaaacgcactcatttattgtataataactgttctgcctagggcctttgcatcttttaatgtttatgactccctaacaaagtgtttttaaaacatttcattaggaatgttccaaaagagcaaataatgggaaatttactcttcgagacttgcttgtggttcctatgcaacgtgttttaaagtaccaccttctcctccaggtatgtaacttaaaacagtttatttattgtccatttattcactcaacaaaatattaatgaagcatcaactacattgcagatattccatgtgttgggcccaatccccttaaaattttgaattattattatagttaagtgggaaataacagaacagctggacattttttcttccttttagcagagatggtcagtagctgccataaatcacattttgtgtccttaaaacaggactgcctagaaaataattaaaaacaagtcaaaacaaataaaaatattttttcaaccaagtcttctgtagttatcagtatttatttatgagcacctcaatattgcagtgcacttgaattttggcagattaatcatattagacctcttcccttgtaacagtaagccaaagagaattgtgtgacattccatattgctttctactatactaaattataataagactacatttattttgaagtgattcttgttatagcccacaaagctatggtttccacggttagtcttctaaatgagggtggagagtcttataaatttaatttgatagctataccaggagactcattagttctgctccaaagaaatgtcttagtgtattagtctgtcaactctgctgatgcttgtgaaatgtcattttaaaaagatctactacctgtatgtgaaatacaattttgcgtcggctgtgctttgtatatcttgtatattaaatttcttgaactgtagctgcaaaattattagtcatctctatttttgttctactgagaaatcagaaaaattcaaaccctgattattccttaaaaatgcattaaaacatttatgagacctaaactcaaagcaacttagtcaaattggattttatgaaaaaataataaggacgactcaggcaatcagtttccaaggcatcctggaactaaatacatgtccaaaataaggtaataatttattttgtaactttggtgtagtcaagtatcgattgaagaatttagaaggtacagctttttaaaaaaatacctattttggtccttacagggttttacacagacttataaaagtataaaatacaactatacttttttgaaatttagtaaactgttccccctaatttcccttgggttgttttatatttaaaattttaagagtatgtttagttccatgatgactttttaaaatagggaaagttttatttggatactacacataggtaaaaattctagaaatgtttttccctctcaaaattctatggagtaaaatttatttgttgtctagaaatttgttgaacaaatgtggttatcagtttagacttttttacttactactatactttagtggcgaaatcacttgaaatgcttgatgatttgaaaccacagattcacaaagtgagaatattttatagtgggtgattgggaactttaataacatgacttttatttaatgaagtaaaagtaacttttaaggaataaaagaatagaatttttatggatttattatacttaatagattctgtctttaagttcttgtttatagcagaaacactggtagtattggattcattaaagatttttgtatggcttctctgtgccaaacatagtattaggcactcgtgatatacgacagaccctactcggataaagctcataatttagaaaggaaaaatgaagtataagctgccaagtataacacaatatgataggtacatgtaaggtacagaaccagcacagttaaaggcctaaataattatgtatagggaagctggggacctgagtagaggcctctgtcatagaagactccccagaggagtaactcttgagttgggctttaaaggaagagtaaggggtcaataagtagatcagaggggaagagctttgtaagcagaaaaaataatatttctaatgggattagatattagaacataatttaagaattgcaattaatttagtatgaatagaatataagttgtctgggtgaaagtggagggagaaattgagagaagtttgcagaattcagatcatgaggagtctaggaggtatgggtgacaacctgaagcttttgtggggcatcacagaagtctgagtagggtagagacaggatctgatttatattatagaaacctacccctgatgacaatagagtgactggactgtagtgaggagagactgcaagtcagaaggccgatcagaagctcattatgattacctggttttgttgttttttgttttaagagagggtctttctctgttgcccaagctagagtgcaatggtgtagtcatggctcactgcagttgggctcaagctgtcttcctgccttagcctcccaagtagctgagactacaggctcatgccaccttgcccagctaatttttaatttttttttgtagagatggggtcttgtcatgttgcccaggctgatctcaaattcctggactcaagtgatcctcccatctcagcctggaaatgtgctgggattacaggtgtgagtcaccatgcttggcaaataattatctgtttgaaaaacgtgaggatctgaacctaattagtggcaatgaggatggttccaagggggcaggatcaaagttaacatcaataggacatagtgagggagagagaacagggagaagtctgggacaccttttaggttttggcttaagtgatgacactgatggaagtgccatcattcaataaaacagaaataggatccaagaataggattctgggtgaagattgattaagtttggggaatgttggatttgaggggactttgaaataatgaggtagaaccatttagttggacggatgagtccgggactcgtgtgaattttgggttgagcacatacatttcacagtaattggcccatgaggtgatagttgacattatgacagtggttgtgatagaatttgtagagtatgtaaaatcaggggaaaaaagaggactagggtgaaaacttaaggaacaataactttctaagaagcagataaagaagaaactatgaaagactgaggaggaggcagaaatttaggatggacagatgaacaattttaacagcaataacaacaacaaatagaacatcctgatgtccctgaaatgaaaggagggatgcagttaaaagaatcaaaagctgaagccaagaataataaatgagtaaaaagtgtgattttaatcattatggaatctttcataacaatagggatcaatgtcagtgtaatggtggtggatagaattcagattcatctttgaaaagaaaatatctcatattgtgtctcatgattttttggtgtctagttggtcttcttacagtttgaaatttttgatggaaatggagcccagacatattagatttatcacattatagagagaaaaccaataataatggtttatttgtaaaaatgttttctttagtatgtcttagttttaatttgatgaaagtagtactaaaccatatcttccaaataggaactggtcaaacataccactgatccgactgagaaggcaaatctgaaactggctcttgatgccatgaaggtagggcagattcatcagtaatttgtttgtattttttattcttgcctaaagacaatggaattcaaattgcatacacacacacacacacacacacacacacacacacatatacacacatatatatacacaaacatatatatatacacataaataaaatattatgacatgcctatgtataatacacatttgtttttagtggagaaaactggatttttttttttttactggaatagttatccttgcatggatttaattgttagacaacgcataaaactaagaagtatattaaaatcacttagatacaagtataaaaactttcataaccatggggaattatttaatatcatatttttttcccattcttttcatggtgactaatagaaaacgttggcttgtgtaagtcgtaggccagctggtggcttcagaaccccatgtaacttattttcctcatatgaggatatctgctaggtttacccttgtggatgctatggcttcatacaagtgaatttcagtttgttcagttttcaggaaaatacgaaaattatgaatagaaaagacagacattttgaacatactggggaatatgtaaaacctcagtttccacattatgttaaataaaaatgactttgaaacgaaataatatttgccaataacttaaagcgtaggcaaatatttgttctttaaaacaaaatggcaaggtgaccctgctcagagcagtgcataattacttaactgtgtccttgtaccaattcgtgttagcttcgctgtttggctgattgtctaccactaacaggaaacaccacataattatttattattattattaaaaagtcaaaccaagttccaaattttaaagaagtcgtttatggatctatcctatgaaaagtcagacttccatttagaacaaagttaggaactgctttttgcagagttctgtccctactgttgcagatgaatttaagagggtagagaaaaaagaaaaagagctcagaaaacaggaaaatctggagcacatgtaacaaaaatagctagttacagtatggaaagattagctaatgtttcctcaaatatgagaaaagacattttaaaataggtgaaggcacatggaaagacacggccagcattttatgttcactttaattcatgaattaaatttagttccagcatgttgtgctatttagttcctcacctctcctttacttctcctgaatccataaacgggttaactctttaaaattgaaccggtttccttgaccgaatgctctcaggaaccaagaagactagccgattgcaaaaataaaacagtcttgctagattcattatctaacttttggttacttttctcatgctaatcgttcatgattgcccttcttctaacctgtgtaaaaatatcatgctctcaaggtcagtaattaacgtgcttggaatttctattcttccgacctagttttctttttgttgctctattgtggtatattttgttttgtcttttaaggcaacaacatcctgactcttctcagtggtgtgacaaatgacagctcttcagtcttcccagctgtacttcagacattttaaaattgcctctgtgatgcagctttgattgactgggcattcattttactgtctttgaaaagttacagtggttacttttaccactaatggaattaatgatgtgttttctttcaaagcagtttgcatctctaatcttagtgtgccttctttttctacccttttctttattgtctaggacttggcacaatatgtgaatgaagtgaaaagagataatgagacccttcgtgaaattaaacagtttcagctatctatagagaatttggtatgtaattatctttccatccagcttcccctcacccccacatcaacgacattctaggagttgttgttgaagaaaacatagtttaccttcaagtttctactgttggaggttgttgccagtccctttgtttggcagtgttcatgtgggtgtctgagggcacctgcaacctgcttgtgtctagggactttgtgatggcttgtccctcttaccttagtcacactctgcctcttctcccagcagtctgaatctaaatataggagtccactttttttttcttttctttccctcatccccctacatactcatggctgattcctattcatttattcattttacatatatttgctgtgtgactattatgacccagacactttgcttggggctgggactgtaactgtgaacaagatggtctcaagattgaggagacagtttaaaaaaaaaagagttaaaaatgccatattgagattagtgctgtgaactggctgctataactgaggattacaaggggagtcctagtttagataagttggttggaaaaagtccttttaagtcatttgaactgagacctagcagataagaagcagccagccacacgaagatctaggggaaagtgacccaggcagaagccgtagcaggtgaaatgctcagagttgggcaagaaccaggtgtattcaagaagctgaaaggtaagagtggctggaaatggagagtgaagggaaggatggtgggctctgagccatgaggaatgggcagggcaattacataacacagccttgtaggccaatatgctgaattgggattttattgtgactgcagtgggaagctattaaaaggtttctatcagggagtattacaacagactgattgacatttcaagaagaccctgtgagcaggcagcccagccagcaagctgttgaagtggtttcaagagaggatgcagccctggattaatctgtgggcagtgcaaatagagatgagtgaatttaagatacatttttggtagagcagtttcatcgctgctttctctgaaacattgtgaacctgtctctttcttttcacacatgcagccacatacccatttcaggacaccatcatctgccagttttccagtcacagtagcctctcatcatctcttcatatagttgcatttccaaaatgtggatttctcaatttactctctttctcaaatttgtcaagatttttttgttgttgtcttcaagattcagtcaatattccttggcatgatatttaaggtcctcagtgatctggacttaagctattttcctgaacccctccagctaataactgcccgtaaactttacattgtggatattttgctgtattacaaggtctccaatttgacatacgtttctacagttctgccttcaattgtaatctcagagcctagaatgtttttttcctattccctatcaaatttattcaaggtgcatctaaaataaatcccttttcctaatctcctattatttttcctctttagaattccatagcatatttcttggacagctgtgtagcctttaaaaaattgtggtaaaatatatatagcattggccgggtgtggtggctcacacatgtaatcccagcactttgggaggccgaggcgggcagatcacctgaggtcaggagtttaagaccagactgaccaacatggtgaaaccccgtgtctactaaaaatacaaaaactagccaggcatggtggcacgtgcctgtagtcccagctactggggaggctgaggcaggagaattgcttgaacccaggaggcggaggctgcagtgaaccgagatcatgccactgcactgcagcctaggcaacagagcgagactctgactctgtctcaaaaaaaaaagtgtgtgtgtgtatatatatatatatatatatacgtatatatatatatgtgtgtatatatatgtgtgtatatatatacacacacacatacatacacacacacattaatgctataaatatatatagcattaatttgccattctaattattttcaaattagaagtgcattcatgatgttgtgtgaccgtctccaaaacttcatcttgcaaaactgaaactctgtactcattaaacatgaacttcccattcttctctttccctggcccctggaaactaccaatctactttctatctctgtaagcttaactactctgggcaccttatataagtgaaatcatacaatatttgccatttcatgactggctttttttacttagcataatgtcttcaaagttcatccttgtagtagtcatgtgtcaacattttatttttttgatttccatttgtttaaagctgaataatacatcattttatataaatacctcactgtttttcattgatgaacatttgggttgcttccttctttcagctattgtgaataatactgttatattattattgtcacaggtgtaccaatatctattcaagtgcctgctttcacttcttttagttatatacttggaagtggaattctgggttgtatggtcattatgttaatttattgaagaattgctataccattttccacagcagctgccccacttaactttcctactaccaatgcacaagggtttcagtttttccacatccttaccaacactcactattcggtttgtttgggtaacagccatcttaatggttttaaagcaatatctcatcgtgggtttgatttgcattttcttaatgactaatgatgttgaatattgtctttgtgtgtttgctggccatttgtatattctctttggaaaaatgcctattcaaatgctttgcccatttttgaatcaagttgttttttgtctttgtgttgtagaagctctttatttgtatcccagatatcaatcccttataagacatatggtttgcaaatacttttcttgtgtctgttggcttttcactctgttgatattgtctgtgaggcacaaaagtttttaattttgacaaagtcccatttatcaatctcgaagaaataattgctgaatctattgtcataaagtttttccccattttcttgtaaaagttttatagttttaactgttatgtttgggtatttgaaacatttttagttattctttatttatggtgtaaggtaatgaagggtctacctttattcttttacatgtggatatccagttttcccagcaccatttgttgaaaaggctattctttccctatttaatggtgttaaccttgttggaaatcatttgaccatatatgtgaggacttatttctgggctctctactattctgttggtctatatacctgtttgtatgccagtgccgcatgattttgattattgtggctttgcaataagttttggaaacaagtcagtaagtatgagacttccagctttgttccttttcaagattgttttgactattcagaatcccttgagattccataagaattttagaatggaattttctatttgtgcagaaaacatcactgggattttgataagatacatttatttttatatttatagtgttaatcacacatctctgccctttattaaaatggaatttctgaacgttagtgattttcagtcaattcttttttcctctagcgtgtacagtaagtgttcataaacacttaaaaataatttagttatcagcctctgggaaaatagctcattattttaaataattaactcagagcttttcgtccttgaggtcctagctcaagaaagccagcctggactttatagaccaaattagcgcgcgcccccccgcccctttctgtactccttcatggcaattgtgcgtttgtaattgcatgcttctgtgaatatttgttcctccactgcgcagtgtgcttcatgagggcagtgtctgtatcattttgccgtacacctgttatggtggttggcacgtagtagatgctcaaaaaatattaattgccgaaccgtctcgtaatttggacccttccggttgagtctttcttttcatagctaatttcccctttaagaatatatactaattaaaatcaattgatgtccttgacataccccctgggattacagaggacagacttatttgtcatgtagacctgagctttttagagtaagtatgctttaaaagtataaaaaatggtaacattttaatgtaataaggtagttgtcttgagtaaatatctctactaatatttgtttttattttcatgtgattatgaaaaactctgacatgtgcattttatattttagaaccaaccagttttgctttttggacgacctcagggagatggtgaaattcgaataaccactctagacaagcataccaaacaagaaaggtaagaaaagaagaatactattttcaaaataagtaattagtgtcagaaaactgagaaaaccttaaagacaatttttccagtgtgaagtagggggaaaaaaggaagaaatacaaggagacagaccaacccatgatttctaaattttttaaatctagattatcttaggtattcccacctgggttctggtatctattagtttgtctaagttattaagaaggaagtaacaagtatagatgatcagctaggatacattaaaatgagaagagcgataaagtaagaacagataactaccataaaaacataattgaatttttggaatatatttttaaataaccaaaaataatagaaaaatgccctaagaaagaagattaagtgagaatcacgtagtaatattttcttgagggaaatttgcagatgtagttcttgaagattagtaagcttggcccggagtccttaattatgtatatatgtaatcatcaaacagaggtttttgtggttgacaatgattgttttctggaatctttggagaagcgaaagccagtagggggcagcatcagctcttgcttcttcctcgataaccctggctccataggtcctttaaacctctctgggagaaatagacgttaaaagtgatgcaagtgttacagccctgtgaatgtgtcattatcattgtgtataaaaaaaatgtgtgttaatcactgagagtttataaaaatacacaagtattggtattggatgatgtggttataaggtttattttctcccccaagttacgttgttcttaataagaaaaaagaaatattaacatggaaatttcaccataacgttttcagtttacacttggctcatataccattcagtttgggtttttaggtggccaattaaatcatgaggaacaatatagagggtaaaagcacagtttccaaaattagacctgtttgtgaatcctgttacatgcctcactagcagtgtgatcttgagcaaattatctaacttctctaagcctcagtttcctcctcaataaaatgaagatggcaatgataccttcccagcatgtggtcttggggatttaaattgagtcatgtttgtgaaagggatgaacacttctcaaggcattctggctgattcctagtaacttcagtagaagctgctacggatgtcattaatattattctataggtttttagcttttaaattaaaaaagataattgctcatgaacaaactttatggcttatctcacttggccctttcaacaactctgcagtgtgcattttactcttactatgatttttgcccatttttaaaatgagggaaccaaagcacactgaggccatttacaaggtaaagggaaattccacacacagttcttataacctcaaataccccgttgttttcagtgtatgatactacctgttgtctttaatgcaaagaaaaaaacatttggttgctttatacccaaaaaaattaataacccatgtttctaaaccatttaaaatcaatcaatcaatctctttttcccaggcatatcttcttatttgatttggcagtgatcgtatgtaagagaaaaggtgataactatgaaatgaaggaaataatagatcttcagcagtacaagatagccaataatcctacaaccgataaagaaaacaaaaaggtgactttttggaaactaataactgtaatttacttataatcttgaacattaaggaaaagtatgataatacattaatgtgagatatggcttatcaatccagatgtttttgtttctagagattgattaggtacataactttgtgagaaataactggataatgccacagccagatctgatcatttctaatgccctaatgatccagataataaaacgcatttggcatagaaattgttatagatatgaagttgactacaataagcttgattgttcagtttgtacattgataatattgtgaggagtttttggatagttgtggtattcttgtgaatttagaaacatgttattaatgatacatattaatctaaggaatattaattttaacagtggtcttatggcttctacctcatccatacccaaggacaaaatgggttagaattttattgcaaaacaaaagatttaaagaagaaatggctagaacagtttgaaatggctttgtgagtatttctatttttaaaagtgcttttatttttactagttaaatcacttatgaataatgaacaaccaataagtgtactctaatgcttgtagcatgtataatgtgtacagcgacgggaatgtttttgctgtgagcaggagtgctactaggctgctggctgcttgataactttggtctcctaggagaggagttttgttgaattccttcaaaaagaagaaagagggagctctaatcttctgtttgactttcttataggcatgttttagttctttagctctcagcagcccaagaaaatattaattattctaatgataaactttttatgtaataactatatttttaaattatatacctttaaatagaaatgcctccaagtgtacatacacaaacagatatgtaaatgcatatatcttatttttaatagaaagattgaattattctgttttaactcgcttatttgaatcttggctaaaatgcttcgtgtatttaaggaatgctttaagggcttgatttctttaagtggcttttagttccactgaggaggaagctcaacaaagaggtagaaaataaatcaaccctgtttcaaaaggaatggcattctgagacgtaataaccaagaacaggtcattataggtgtttctttttagttttgatgtttaaggattgaaaggtacacaatgaccctttttgtagaaatatataggataccctgaaataaaactgttagcaaaaggggaaattaaggaaaactacatttggaatttgtttcatttgggttctaagattatataccatttgttgacaaattctgtcagttttttttctttgttttaagaaatgctcatgttaatgtaaactagaggtaggaataggatgttttattgtggttctgaaattaggaaaataaagattctcaaggttattttatctaacattttaagagacaggattctatagccaaactatttacgcttataaagattatttaccagttgttgacaaattctatcaattttttttccttgttttaagaaatgctcgtgttaatgtaaactagaggtgggagtaggatgttttattgtggttctgaaattaggaaaataaagattctcaggattattttatctaatattttgaagacaggattatatagccaaaatatttaagcttatagtcaattctgggttcatctattatcactgccatgaactggctgcataatgaaagctaagttatttaacctctcacagcctcagtttcctcatctgtaaaataggaatgatatttatttcaaattctaggtaatatgtatcagcagagagctagccaaatagtacaatagcagctacagctatgtgatattgaacaataggtgatacctattattattgctattattattaataataattgcatttgggattctagtatacttacaagacttataaaactacataacatattctagtatactattttttctttttaggaagtcacttggagttaaacaatttgaattggagtgataggatgattgggttagtggtaatatgcaaagacagagctgatctcgagcctttgctcttatatgctaggcttttttttttatgggtttcgtttggctatataatcttcagatgagtgaaggaatgtctgcagagaaggaaattgaatttcatgtcctagagcaggcaggttccttggactgtatgacaggcatgtcagttactattttgttcagttgccataaaacaaacagttaatttgtggatatgagagacttgatggccaggtgtgatggttcatgcctgtaatcccagcactttgggaggctgaggtgggcaattcacctgaggtcaggagttcgagatcagcctggccaacatagtgataccccatctctactagaaatacaaaaattagccgggtgtggtggcacatgcctgtcgtcccagctactcgcaagactgaagcaggagaattgtttgaacctgagaggcggaggttgcagtgagctgagattgtgccactgcactccagcctgggtactagactgagactccgtcttgaaaaaaaaaaaaaagagatttgacaagataaatactattgtcagcatttgacttctctccttaagagtggttaccttgtagtctgagatagctgctagagctctaggtataaaatttatgttctaggtagcagaaagtaatcccacttttatggattccttgtagaaataccactcgcttctgttacataatactgaccaacgtatagtcatgtggccgcacctgccgagggaggctggcaaataaaacctttattctaggtaggattcttcctggctaagaattaaggttcttttactatggaagaagggaggaatgggtagttgtaggcaaccagcagccaccgccttacaggtttatacatataggggtatgtacggatttaaattgttccaccacaataaggatggctgcagcacatgcacagaacctgggtttcttaatctttgattgttttccaagcatctcagcaataaaataacacaccagtagaagtagtttttgttgttttagagttccgttgaatgtctatgcagatattgggagggtagaagtatctttttggagaattgctcagagttgaagttgagggcttctataaataagggttatattatatatggttaaataaaatctgagcaggcatcagaatattccattgttttatttccttcttctttgaagttcatcatgtaggaaagccctgataatgtctgcttccagctttgtaagacaggttttgcctgtctgatgctcataaaaatagaataatataggtaaatcctgaagtttgattttgcctatggttcaaattttgctgcttatccattattaaatctgtagtactcctttttgataagtcatggagaataaaagaaaataactcctgcagcatccatgacaatgcatgaagaacagcaagccttgtgtatctccacaggatggcttcttcccagtgtctttagtatcaacacgagtcccttgagttcccctagagtgctctggactattgctttaaggaattctgaaaaggaaagggaggcattggtgagagggtggagggaaatcaagggagctgatatttttaagagtgttgaaatgcttgccatttctatttacagaagatggcaattctgtttataggatgattggatcatttttatttaaaattattgcaaatcactgttaaggcacttaaaatactatgttaagcctctaaattagggctcttaatttagaacattaaataaggccatggaaaagcatgaacactaatgaacagtaagtatctggtgaacataaatattctccccagaggtgacctaaatctcagcctctgtctctcgcagtcatgttctctgaccttctttggccataaccacttccagcatttaaaatatgcagtgaaccacattagaacctgacagacctccataggaaaggctgaacaaagagaaaagtagcagtgacccacttggatacggcaggaggattcccccccgcttttttttttgtgataagtggtagcaggactgatatgttcttgaggttgttggaaaagttattgagccaaatagaccaaatagagtgcaagggctgtagttctggggggcataatgtaaataatgtatttaaatctttaagaggctgatcgatatgcattgcttacttttatttattccaaaagggttttattttttttttgtcactaactgtctctcacaattccatttagtcatatgtgaaacaggacggcaaatggttttattgggttaaactggttttcataatcatgctggaaaatatggatataactgcctatagcaatgttcaaaattttgttaagaagctatggatatgttttccccaaatccaatatatccattgtgcttttatgaatttttctatgagatttaaattaataaaccttgtcatacccgttttgtagctcaggaaactagcagtcacaggagcatttgagcaaatgtgtacaagtttgatgctgtatcatttacagtacagttgaggatctcagttcacaggagtttctttatccataagggtgctaaagtaagcaactggactcagatcttggcatctaaaactggagtccaggttttttgtgttttttgtttttgttttctcactgtgaataggatctagcaatcagacagttttcttaaatgtcccaggaataagttaaacctgagtaaaaaataaagaagtataattgtatttaagttggtgcaaaaataattggggctttgccattacttttaatggcaaaaaatgtttgtttgtttttttaaaaaaagaaaagttagcaaaagaaaaggtaaaataagaggcataccataagcatcacatgtggtagaaacaggtagattcagaattagccttcatagtgttttttgaagggaaatgaaaggtcctcttgcctagaatttcttctgaccgaccttggcccagtttttgaaattctaacaattctcatttacccccttgaatgaagaaagactctttgagatgcatatgccatcactactgtgaatatctaagatttctcgactgtgtaataagtgcctggcacagttctacatggcttacctaagggaaaatagcatagaggtcaggcctgtctactgaaatattagcccaggatgtttatcttttaaacacaaggactaatggtagtgggacgaagagaatgagaatgggggatggagattctagagctctggagggactctgggaccaggatgcactatcctgttggtcatccggagcggcagcccctgcctgagctttgcatttcccagaatgagccctgagaggaccttcactgttgggatggagcagggagtgagaatgtagccgttaagctccacaaatcacatttaatctgaggcacagtgtttctttctaatttattccccatctacttccagaaggaatttgaagtcactcacaataaaaagcacacatgctgcagaattaaaaagaaaaatttaaataatccgaggtcaaatagaacagtgtttccaagtattatcttcaaactcaggctccactagacaagaatattttcttgaagtttactttctgtagtttatatgataaaaacaaaaagcatgtttctcacatttcaaatctagagttatatttcatcaaacataatttgttttaatctaaagatattgctcagatattttgaataccagagagagaattaccagaggaaattttattcattctgcaaatatttatcgtgcacttgccttgttgccagacactgttggaagccctgggcaaataacaatgagggagccattgcaattgaatttaagtattattatttctaaatataataatattctgttaatatataatggattaagtttcaggactgaactcttgatatttctattcaaatcatctcttcctttaaccccatttacttaaggatcaacatacagagtcccaagaattacgcttgatacagccccctctctccacttgtaatcaatctctcaccagtctctgcacatcaaatctgaatagctgcctgaactctcccttgccacccctggtttacgtcttctgcatgtctctttagctattccctacctcttcccaaccagtccttcttcacaagcatcagagtgatctgcccctcttagaaagctctgttgggtgtttattgtacttgctataacaccagagttttcgctaggatggaagaaggccctgactggttttatcccacccatctttccagccccatctcctatcagttttccctgtgcttgtttctttttttctagttagattgtgtgtttcagttcttagagaatgcccaggcctcagatattcacacataagctttccctgccaggcctggtctttcctcctgttctttgagtagctggttctatatcctgcaggtcttggctgtaaatgttactttgtgagggagatctctcctgacccctatgctaagtgagtaataccaccttttctatattctctcacaattgtatttatattgccagacaaaaattatccaagcatcctgtttactgccttctcttcatccaacaatccctctgcctgttagaatctgaggtcgtttcagttttacttctcttttctcctaaagaataaggattctgttttgtttattggaagggaagttaagttgaacctcatggttagagatgtgggaaaggggaaaagaaagcctcgtggatctgggaatggaaagaaagtattgggtttgtttggtgtgagtaaggctctgggatagctatggcatctgagagatttgagaaggggaaaaggccttttgagatgcaggtgtttggaatctcaatttatctttcctttatgttctttgaaatgctaagtaaagaatgaaattatcttttgtttattttggtgtacctttagtggcccaaggctgaactgtctgggcccatggaatatggggttgccattagatctgtttgcctatttaatgtctgtttcttgcatgagggcagggatcttgtccctgttgttcacatgcgtgatctttcatagcacagtatcatatttttgttgtaaatttgaaattttactctgtaagttttctgacaaccaagacaagtgggaaaaaaaaagacttgatgagttgtggcattcttattgtgtggcaaaatattacaacagccctttggaggagagagtttttcctgtatggtaagaaggctatatagtgtggatccttaggtaggagacattgaaaaacatgttctctaccagcagcattagattttttgatattcttgaagttgatgccatagatgagtatttctcttttatgtaagccttcaactatgtaattgcagttttgctaaggcatttttatagacacctaacctgatgctagcccttccagatgtttctttctagtagtctggcttgcttggataaaatttttggaaccaagcaggatgggcaattctcattttatctagcctgtcatttaagtagcactgatctcactcatttgtatattgaaaattgtagaaaatatgcaagtcatatggtatttggggcctccttgctccttggagatgtagacagaggttagcccagattccagttttagggtctgaggtgctcaaggcccacctacattctcatatttctctctctgtccatgttcttgattcactgtggcttttttggtttttgtgtgtgtgtatatatttttttaattttcccacctgtcagacccaggagaaaggatctatgccttttccattttccacctgaaatccattcacagtctattttttgtaatgccaacaggcgtcacagtggggcttatgtcatgcatgtgttccctcggctgtttcactggtctttgacaccctcagcagcacctggagcatgaccctccccaccctgcactgctccctgcagaggaccagcaccccttgcctcaccaccccttcagggagcggctagtcaggccggacagagtgcctcccacacccatcctgggatttagaggaataaagccatgtcatgttacccagcaattcaaaattaagctctccagtgagtgtttcaaaagaaattggtctttgttgttaatttttgaaagacccatgtttctattattaaaggtttggcaacaaatttgacattcaaatgtgaaaatttaaaagattcactttgttaatatttttgcccagatggagatgcctacagtatctgcatgaagctgtcggagttctaaagcaggcctaagaaacagcaactactaccgctatgagtactgctagtcctctcttcccttcctgtcccctcctctctcctctttttcattttcttcatcaggaggtttgtttggatcttctcaaatgtttaaataagtttctgttgagacaacaaatttcgtctcttagaacaagggccagcaacattttgttgtagggggccagagagtaaatggtttaggctttgtgggccatatggtatctgtcagagctactcaattctgtcatagttaactacgaatgcagccatagattcacataaatgaatgagtgtggtatgttccagtaaaacactagtggttgtatttggcccgtgggctgtagttagtgacccctgtcctacagcacaaataagatgacttaggcctagagaattagttaatatatgttaccacaaaatgatctcagctataatgaaaccacgctgtggccttttgtagaagtgtgattttttttttcttttatttttagtatcagtgattcctgcttaggctatcatgatgatttagctccaaaatgttttttaactccaccaaaaaaaactataaacctggatgaattatctatatttgtcattattattttactgtctaattgaatattaaaaatgtctgctcacagaacagactgtatctattcaatttctagtttcattaagttttatcacatggtttattgaaaaggacaggtcccacggagtccaggccagtagcagccatgtagtaactttttctctattcagtagtcagccatatcaacaagaagcatttttttttttttttgagatggagtcttgctctgtcgcccagcctagagtacagtggcgcgatctcagctcagtgcaacctccacctcctgggttcaagtgattctcctgcctcagcctcctgagtagctgtgattataggcacgcaacaccacacccaggtaatttttgtatttttagtagagacagggttttgccatgttggccaggctggtctcaaacttctgacctcaggtgatccgcacatcttggcctcccaaagtggtgggatttcaggcgtgagccaccatgcccagccaagaagcattgtttaatcagtgatgctctttgtgctcttgatgcattttcttcccagcagcaataccatttgtgcctgttatttactctgaaatttcctccctggagggcatactaaggaaaaccagaaggggtagaggaagcctgtggtggtatcaagagttggccagagggggagccttcctggatgagctggatgtggggatgacattttgtcacctgctttggcattttcttagtgtccaaagcccgtcagtgtctgtttggaaactggaggccttactggcataatggccaaaatatgtctataaactgtctgtatatttgtcagcccttttggattgttttttgttgagaaattattttctctaaaaacctcacattcttcctccttaaaatgcttgcatgaccagtttttaatgtgaagaatttgtttatgggtgcagaatccatgccggcaccatcagttgcctctgggctgtgctgagagtctcatggtgctgacctattcacattaatctcccaagttgaagccagctcaactctccctgaatctaatgtattgtctataacctttcaaaattggcagttaagtcaggatagggaactatactggcagcaataaaaggaagtaggacacgggacagtgctcagaaaaatcacagctgtcatgaaatggagtctttcaatagcctgtttgatccggaaacatgcgaaagtatttcatgcatgacaaaggattagtaaatattaaatagtattcttgttttgttattgcctagtgaggatcaagctctctcatttttctctggttatgtttaatatgtatttgatacttcttggcattcttgaacatgcttatgaggaaggagaagtcacaggcaggaggaagagcaaaggatgatatcgaaatttccatcagcaaataagcattaccctggttaaaactaaatgcaaataaaattagtaagctgaattagtgtttgtttccctgaggctttataacagagcctttcatctgttgttgtttttttctttttctttttaaatgaacaataatagtacagccagagagtttaacctgacagtggtggttactgtgctactgtctccggcttgtctgagtagtgtagagatttgctcaaagagtaagattgttttggagttgtttgttgtactaagtcaacttggtatatggtttcctccaagtatatgacaaagtctccactgcagtgaattctatgataataatcaagctttaacctataagtctaaacctaacagttagtgtgacatgtactatttttaggctgcttcttgataagaaatgattagatcacaagaattactactttgggctatacaacacaaaataagctgcgattggaaactggcaatccttgcaatggaaacgatgggagaaacttagttttttgtctttatggggcagtagacaatagcaggctagttggggagatggcaaggaagtcatacttgaaacaatttttgaataagactatgtattgtgcatttcacaatacatgcccaggaagtgttttacacactaggggtagagtgatagacaagttcacttctcttgtgaagtttgcattgtaaaaagacaatatattttcttttcttttcttttttttaatatgctttaagttctagggtacatgtgcacaacgtgcaggtttgttacgtatgtatacatgtgccatgttggtttgctgcacccattaattcatgatttacattaggtttttctcctaatgctatccctcccccattccctcaccccagatgggccccagtgtgtgatgttccccacccttcgtccaagtgttctcattgttcaattcccacctatgagtgagaacatgcggtgtttggtgttctgtccttgcaatagtttgctcagaatgatggctccagcttcatccatgtccctacaaaggacatgaactcatccttttttatggctgcacagttattccatggtgaatatgtgccacattctcttaatccagtctatcattgttggacatttgggttagttccaagtctttgctattttgagtagtgccacagtaaacatacatgggcatgtgtctttatagtagcatgatttataatcctttgggtatatacccagtaatgggattgctgggtcaaatggtatttctagttctagatcattgaggaatcgccacactgtcttccacaatggttgaagtagtttacagtcccaccaacagtgtaaaagtgttcctatttctccacatcctgtccagcacctgttgtttcctgactttttaatgatcgccattctaactggtgtgagatggtatctcattgtggttttgatttgcatttctctgacggccagtgatgatgagcattttttcatgtgtctgttggctgcataaatgtcttcttttgagaagtgtctgttcatatcctttgcctactttttgatgggttgtttgattttttcttgtaaatttgtttgagttctttgtagattctggatattagtcctttgtcagatgggtagattgcaaaaattttcttccattctgtaggttgcctgttcactctgatggcagtttcttttgctgtgcagaagctctttagtttaattggatcccatttgtcaattttggcttttgttgccattgcttttggtgttttagacatgaagtccttgcccatgcctatgtcctgaatggtattgcctaggttttcttctagggtttttatggttttaggtctaacatttatgcttttaatccatcttaaattgatttttgtataaggtgtaaggaagggatccagtttcagctttctacatatggctagccagttttcccagcaccatttattaaatagggaatccttccaccatttcttctttttgtcaggattgtcaaagatcagatgtttgtagatgtgtggtgttatttctgaggcctctattctgttccattggtctatatctctgttttggtaccagtaccatgctgttttggttactgtagccttgtaggatagcttgaagtcagctagcgtgatgcctccagctttgttctttttgtttaggattgtcttggcaatgcgggctcttttttgtttccatatgaactttaaagtagttttttctaattctgtgaagaaagtcattggtagctggatggggatggcattgaatctataaattaccttgggcagtatggccatttttacgatattgattcttcctatccatgagcatggaatgttcttccatttgtttgtgtcttcttttatttcgttgagcagtggtttgtagttctccttgaagacatccttcacatcccttgtaagttggattcctaggtattttattctctttgtagcaattgtgaatgggagttcactcatgatttggctctctgtctgtaattggtgtataggaatgcttgtgatttttgcacattgattttgtatcctgagactttgctgaagttgcttatcatcttaaggagattttgggctgaggtgatggggttttctaaatatacaatcgtgtcatctgcaaacagggacaatttgatttcctcttttcctaattgaataccctttatttctttctcctgcctgattgcccttgccagaactttcaacactatgttgaataggagtggtgagagagggcatccctgtcttgtgccagttttcaaagggaatgcttccagttttttcccattcagtatgatattggctgtgggtttgtcataaatacctcttattattttgagatacgttccatcagtacctagtttattgagagttttcagtatgaaggactgttgaattttgttgaaggccttttctgcatctattgagataatcatgtgatttttgtctttgattctgtttatgtgatgaattatgtttattcatttgcatatgttgaaccagccttgcatcccagggatgaagccaacttgatcttggtggataagctttttgatgtgttgctggattcagtttgccagtattttattgaggatttttgtattgatgttcatcagggatattggtctaaaattctctttttttgttgttgtgtcactgccaggctttggtatcaggatgatgctgacctcataaaatgagttagggaggattccctctttttctattgattggaatagtttcagaaggaatgtaccacctcctttttgtatctggtagaagtcggttgtgaatccgtctggtcttggactttttttggttgttaggctattaattattgcctgaatttcagagcctgttattggtctattcaggaattcagcgtcttcctagtttagtcttgggagagtgtatgtgtctaggaatttatccatttcttctagattttctagtttatttgcgtagaggtgtttatagtattctctgatggtagtttgtatttctgtgggatcggtggtgatatcccctttatcattttttattgcgtctatttgattcttctctcttttcttctttattagtcttgctagcggtctatctattttgtgatcttttcagaaaaccagctcttggattcgttgattttttgaagggttttttgtgtctctatctccttcagttctgctctaaccttagttatttcttaccttttgctagcttttgaatgtgtttgctcttgcttctctagttcttttaattgtgatgttagggtgtcgattttagatctttcctgctttctcctgtgggcatttagtgctataaatttccctctacacactgctttaaatgtgtcccagagattctggtacgttgtgtctttgttctcattggtttcaaagaacatgtttatttctgccttcagtttttaatttacccagtagtcattcaggagcaggttgttcagtttccatgtagttgtgcagttctgtgtgagtttcttaatcctgagttccactttgatcacactgtagtctgagagacagtttgttgtgatttctgttcttttacatttgctgaggagtgttttacttccaactatgtggtcaattttggaataagtgtgatgtggtgctgagaagaatgtatattgtgttgatttgtggtggagagttctgtagatgtctattaggtctgcttggtgcattgctgagttcaagtcctggatatccttgttaaccttctgtttcgttgatctgtctaatattgacagtggggtgttaaagtctcctattgttgtgtgggagtctaagtctctttgtaggtctctaaagacttgctttatgaatctgggtgctcctgtattgggtgcatatatatttaggatagttagctcttcttgttgaattgatccctttaccattatgtaatggccttctttgtctcctttgatctttgttggtttaaagtctgttttatcagagactaggattgcaaggcctgcttttcttttgctttccatctggttggtagatcttcctccatccctttattttgagcctgtgtgtgtctctgcacgtgagatgggtctcctgaatacagcacactgatgggtcttgtctctttatcctatttgacagtctgtgtcttttaattgggggattaggccatttacatttaaggttaatattgttatgtatgaatttgatctgtcattatgaggttagctggttattttgcccgttagttggtggagtgtcttcctagcattgctggtctttacaatttggcatgtttttgcagtggctgttaccggttgttcctttccgtgtttagtgcttccttcaggagctcttgtaaggcaggcctggtggtgacaaaatctctcagcatttgcttgtttgtaaaggattttatttctccttcacttaggaagcttagtttggctggatatgaaattctgggttgaaaattctgttctttaaaaatgttgaatattggcccccactctcttctggcttgcagagtttctgctgagaaatccactgttagtctgatgggctttcctttgtgggtaacctgacctttctctctggctgcctttaacatgttttccttcatttcaaccttagtgaatctgacattggtgttcttggtgttctctgtatttcctgaatttgaatgttggcctgccttgttaggttggggacgtcctcctggttaatatcttgaagagtgttttccagcttgattccattctccctgtcactttcaggtacaccaatcaaatttagatttggtcttttcacatagtcccatatttcttggaggctttgtttgtttctttttacttttttttctctaaacttctcttctcgcttcatttcattaatttgatcttcactcatttataccctttcttccacttgattgaatcggctaccgaagcttgtgtatgagtcacgtagttctcatgccatggttttcagctccatcaggtcatttaaggtcttctctacactgtttattctagttagccattcgtctaatcttttttcaaggtttttagcttcgttgagatgagttcgaacatcctcctttagcttggagaagtttgttattaccaaccttctgaagcctacttctgtcaactcatcaaagtcattctccatccagctttgttccattgctggcgaggagctgcgatcctttggaggagaagaggccctctggtttttagaattttcagctttactgctctggtgtctcctcatctttgtggtttttatctacctttggtctttgatgatggtgacctacaaatggggttttggtgtggatgtcctttttgttgatgttgatgctattcctttctgtttgttagttttccctctaacagtcaggtctctcagttgcaggtctgttggagtttgctggaggtccactccagaccctgttttccttggtatcaccagcagaggctgcagaacagcaaattttgtagaacagcaaatattgatgcctgatccttcctctgtaggcttcatctcagaggggcatctggctgtatgaggtatcagtcagcccctactaggagatgtctcccagttaggctacatgggggtcagggacccacttgaggaggcagtctgtccattctcagagctcaaacaccatgccgggagaaccactgctctcttcagagctgccagacagggacattttagtctgcaaacgtttctgctgccttttattcagctatgccctgcccccagaggtggagtctacagaggcagacaggcttgttgagctgaggtgggctccacccaggtcgagcttcccggccactttgtttacctactcaggcctcagcaatggcagatgccccttccccagccagtctgccgccttgcagctcaatctcggactgctgagctagcagtgaacgaggctccgtgggcatgggaccctctgagccaggcgtgggttataatttcctggtgtgctgtttgctaagaccgttggaaaagcgtagtattaaggcgggagtgtcccgattttcctggtatagtctgtcacggcttcccttggctaggaaagggaaatcccccaaccccttgagcttcttgggtgaggcgatgccctgcccagctttggctcgccctctgtggccgcacccactgtccaaccagtcccagtgagatgaaccaggtacctcagttgtaaatgcagaaatcacccgtcttctgcgtcagtcacgctgggagctgcagaccggagctgttcctattcggtcatcttgaaacggctgcccaagacttatattttcaagtcagcattataatgttgatgcaaagcagtgataaattgcaaggtatatgaaacagattatactacacattgttttgatctgtggagaatgggattagaaatttcaatgtagaaaagtcctgtgcatgtgatgctgatggacaaattttcagagttattgggctcctgggcatctaagaaaggcatttgcaaccaaatattttttctcttcacttagaagtaagttgttgtaagttaagtgtatatgctttcgcttcaaataattaggaaaaaggtgccatttgacaccaatatataatttagaaaaactgatttgtcatagttgttttttcccatcgattctgaataccttttcataatggtcaaaatcttcagaaactatacagttttataaattcatacattctctgaagaggagattaaagctcctccattttaacaattcactgcttgagtctttcgtacaacttctttccaagtatatgctgtgcttggatgcctcttgtgatgagggacggactgcctctgaaattgcttgttttatctttggttagctttcactgtagaagattcttccttataatgaagaagattttactatagaagattcttataataactggagaagattcttccttataatgagtttaaattctttgtctgttaaagtataatttcctaatatcacttcttgggcccaaatagaacctatctaactcttccttacctggaaatctttcagatatatgaagattgctatccctctaagtccaggcttaaaacatattgttttatgaataaatgaaaagaaacttaatttaggaagattctttcattaacgtagcttaccagtgctaatgaggatcaggtaaaagtgtggatacattgaaagtttcatttcacctcagaattataggcagggtacaatgaatgctagatgctgttgtcctcacaaagaaaagtaaatagaacagtttatctttttgagatgtttagaagtcagtttggagacttctgattgaattgtgcatagcattttaatattctgcttttgagtatttaaaggatggcttcagattttaatactttaatgttaagagtatttagagtctgggacatgtagtgataattctttgctgttatatcgtgctttacaagtagtttccaaagcatttttggataatgcccaatctgattcttaaagagtctggtgaggtagctaagaaggtattattccttttaaaaaatgagaaaatagtagagagattaagtattttttcatttccttagcaaatgacagaagctgagcttgcatctcaatctggggctttttctctcataccatgctgcctcatttgtagcaagaacacctactgttgttttctaaagatgaaagtttccttttcagtttgttttataagcaagaggtattcctgtgtagcatattcattcactagatgaaaaatatgatttagagtttaaatacttgcacttatttttcagtgattgctgttgggtaagaatttgatatttttataaaatcaaataataagtaacattgtgtatattattaacaaccatctgtaaggataatttttgcttcaaagaatttccttagagcaaagtaaaccaaatcttaatttacaagttaatttatttcaagattttttgatcactttattttatcacagtctaatatgattttgagccttatatgattaatgcaacggtttgattttatttggttttgtggtgttttcttctcccagttatttagataagattttagtctcagagtttaagttctgcttttagaagtaaaggaactgagaaggaaagcctcatggtctgaggctaagccctggccaattatcagggtggattcagatgatcgttaaataaatatgtgtgtttctttccatccagaactttggtaacattggatgtttttacataagttgctgaaggtatggacacagtatgataatgctgtcatccttctccttcagggtacactttagactgaccattgactagcttctccttcctggggagaaccaaatttgaagtggttatctaaaccatgtgtttgacccgtcacttattaaaatagtagactttcttctaaaatgttcctctaagaaaacactgaagtttgggagttcaaatttttgccctcaaagtagccagactattccattggtcgatggtggtccctgattgtttagtcctgtccacatattgttatttatctgtaacatcactatctgtacaaagcagctggctctttgaataaagaaaggtaatttcaaaagccacagtgccctacattaatgatctctaaaataaaatttttgactaaaaacaatactctttatcgtttgttatggtaaacaacaaaaaataatttttgtatttattatttttccaatctttccttgtatcagtccaatgagataattcatattttctgacattagcattgtattccaagcacaatgctatgctttggatgctcatcttgttaaataatcacaaaattatgatggagcagtttatcctgttttagcaaatgagaaaattcaggaccagaaatgtaagtaacttgcctgaaccacacagctcatcacagaacagggattccgtacccatgccccttcagtgcaccatgtcgtaggacatccttttccattcttttctttagagagtttgttgtccaaattgctggtaaggaataaaactcatgtttttttttaaactcaggttttctatctcctaaccccaaactatagactttctgcatttttctttgtttcttttcccttggataacaacagcaaccagaaacacaattctctcatctattatcatataccaaatttgccttatgtagtctttgactaatgacttgttggtcagaatgaactcagggatctgttctctgatagtacattaataatatatatgcattaaagcttcttctcggagaatatttgagctttgacatattgaacactggcattttaaattaaagctgttgctgtcagtgcattttaaaaactagatagcttcgaaatagtgtttcatacataacaaaatatacctgaggtcataagtagtttgctaaggcaaaactatgcctggcctggttaattgtagtaggggcttgaatagagttttccaattatcatgacctaaacatctttcagactgagaaaaaaaactaaactgttttgcagggctttgatttactagaagaaacaccatagagcaacctaatggattttctgcatactgtcggagctaggaataatgaatttaaaactattctgaatccttcaagacaggagagtatcaagattaaaatgatacttggtgacaattataattctatagttgcgccctcggcttgcattattgtttcttgtcttgcaaacacttttgtatcagattatattagctaagcagtctttttgcttgtggcattagactcatgcaagtttataagtagtgtgtgttaagcctttccctttgtagagctgatttggggacacggttttacacaatacatatacatatacatatacatatacatatacatatacatatacatatacgtatacgtatacatatgactgtcctcatgaagattttttctgtagggcagtgtaatagaaagaatccccgattggaaccacagaggtcatgagcaacacccacccaccctcactcctgctattttatagatagatcaattaacagattatttttccctcaaatgccactatactggatggtctcagacttcgtatccagtcagacccagaagacttcctctacagagtaatttgcccaaagccacaggagtagtaaagagtggaactgagactattaaaggaaccaggtcctttaatccctggtgattcctcttcatttagaacagatcttgtgttagtgagtacctttccctaaaatgggggtctgactctttgctctatatctttgtcatgaaaatctgccaattccctgtccaggagccagtggatttgggacagaggaggaagactcaaccaacctccagtggatattagcaataggacctgtttttccaccatctgtttgacattaatgtactgctcgctgttgacattgcagatttatttccagcaggccactcctgactcctgaatacttgatactagcatgaaactttctaattgcaggatacagtgaaatccaaagtgagttagaaatttaattaaatttcttgcttgtttaattgtttaatgtgtcgcacagtccagcttgcaattccatattcaattataatgaaactccccttagattgagtttgtcttggggtttgatggtgagtctaaaaagggtattgatgctttaagagaatccttggttttataaaatttcagtgtaagggattgagtgttttagtattaggtttgtattgactcttgatattgacacaagtctaaatgtgcaaagcccacaaaggctaaatcccataggcttatatttaatttaaaatatggctagctggccattttgaatatacttgctaggttgacaatctgaatacttgactgattgggaaatagtcaaatattaattttaaatgttcattagtagactgtttgtaattggtttttaaattcatttggcaaatgagaattcacatttatttaaaattgccaataaacctgatttcataaaggtgtttggaggttaaatgcctaataattaatttatgcctaagtaatatttttaataatttagaggaaagttaaagcagctgagaataatgttaatgatgaaaagtaatgaaggcttcaagattccaagatttaattgtggagatcatattcatcatcttaaaaacagaataggaaactggatggaaaagacattttagtggagcttaaaaaatgctggtcaaggagaacaaaattacgaaagaacccaaaccctatcactgacttggccatgggacccaggcaagcctgtcttcttctctgaaacttaattcatccatacttgaagaggggtttgaaaactatttgtaatctatttttgttttgcatggcaaaagaaggtagaggaagtgtggaggttaatttaattgtgatacaaaaataatgatgtaatcaaatcctcttttatttctacccaaccgttgttatgatgtttttctcttgggcttattctttttttattttcaaaaataatgttagatgattattactcattgtgtgagtgtgtgtgtatatgtgtatacatgtgtttgtgtggatttacacactagacaatgatagcatggtccctttgggaagattaaggtgatgacatgctttaaactttgtgtacccactctgtaaaccatcagtaaaattcaattagcaggctttattccatctgtagaaatataatgatgctaaaataatcaaaatctatttaatcaatttcattataaatgaagggattgcttgcattcaaaatcttaataaaggaaacgaggttggtagtctatgctgattcagtaaaacatatcgtatcttgcaaagccaaagaaattaactgtaaacccttgatcaaaaagcacagaaagtgtgtgatccagagagcttgataactgctagcttttagtgaagaaggctttttgatgttacaagcacaagaagccagagcgttattatgtagataattgattgattaatttaatcaatgactttctcaaagatggttctgagacatgactgggaaaactgaaatgagccagctggccattggcggtccacacctctccatgaaaagtatctgcagagcgcctctgccggagcacagaggactttctggcggaattcctgtagcttgtgtgaggatcaaacctaagcagagtttaatgaaattctactttggagtgatttgtttatcttctgtgagcaatttctttctttctttttataggttgattgatttatctgtatgtgtattcctcagtgcttttccttgtctgaaccaaaagtgctttgcaaatatcagagctcagatttttaaaagatcattgatttttttcaaatatcctgaaggtaggctgtcacacattattatttaattctgagatagggatattgatagcataatattaaaatctttcattagagaatttttttttggtctagcaataacctaaattcgaaggagttttgttttccttcatctatcagaattgttatttaaaagtacccactacccaggacagtatggttactttgttgccttcaggaaagggaatattgtcattggcttaaaacattctactgtgactgccagatattataggtgcccaggagacccaggaaacaggcctttggttagctactgaaatttgccatctgggcacggtggctcacacctgtaatcccaacactttgggaggctgaggcaggcagatcacctgaggtcgggagtttgagagtagcctggccaacatggtgaaacccatctctactaaaaatacaaaacttagctggtgtggtggcacatgtctgtgatcccagctactcgggaggctgagggatgagaatcacatgaacccaggaggcagaggttgcagtgagccaagattgtgtcactgcactccagactgggcaacacagtgagactccatctcagaaataataataatgatgaatttgcctagcataaccagctcttcaaaagtttggtcaaaagccggtaaatgcttagtattgtgtagacgttccacagtgtccctctcactctctttactttcggctgcatatttccacttgttatcaccatctctgtggaaagctccattcaggatcagcaatcttcttgattcagaggaccattcatgatgttaaggatctgctagtgatgacaccagtcacacagaacaatcatgaggaggaagaatatggggaagtctttaccatttcctcctgggctactgttagcttcttacctggtctccctgctgccattgtagccacctgactcccaactgactgttgtaagagtgacctctctaaaccgacatgcccctctccatggttttatcatttctgattcctttattcactcctgatgtcactgtcttgctttaggtcttcagggtcttctacctagattgctatggtcatctctataactgtctccctgtctctcacctcaccccttcagcatggctgctagagtttcctaaatacaaatatgatctggttatctgcatacagtcctttagtagtcactccttggccacagaacaagatcagatttctggagtatatgcacaaatggcatttactatctggcctgtgctcagctctagccttttttttttccccccaccacatccagtgttgcaaccagactgaattccttcctggcagcttccagaacatgccaggctcctttatacctctgcacctttcatcatagtgttctttactggctcgggatctgttctctgctgaggtgtgctagggaacatctatttatcttttaagactcagattgaaagcagctatgcccttttcctgtgccaccccccatcctatactgtaggattgtccaatctctctttcattctccaccatatcttacacctttgggaatcactttattaggtttacttcttttcatgtctctatcttcatcctagattgaaagaactgtaaggccagaggccatgtattttttgtcccagtacaatgcttggtactcatcaggcatttaataaacacttattgaataaaagaatgtctgaagcagctgaataatagtataagacaactttcagattgtaagtgccatataacttcagagaaaggacagatcattatacactacagtaatctaggatgctctcaaagaaaaagtggggacctatgttgcagggatagatcacatttggagtggtagagggaaggaagactattcatgactaggaataactgtttggggctgagacggaggtgaacatttaaagagtactttgaataaatgggtttctttacttatgatgaaatactatgattggagataccattttcctaattaaaatgttgctgttgttcttcatgactcacatattaatttctatactccttaatattgggttaagagtcaaatcagagttcactctgttagtcgcttcacgagccttggacaagttgcttgacttttctgagcttcaatttagaaatgaaaaaaatggagacataatagctacctcaaaatgtgtattgtagcatttacgatgtgttctctatttatccaatgtcagatatagtacaggacactttatgtgtattaagtcttgtaacctttatgtcagctccattttgattaggttattgtttttgttctaatttacaacagaggaaaaacaacggtaccaccaagagaaatatggaagtatggaagacatcatctcagattgttttggaggttggaaggaacagctcctctgtatagggtggctggcagcagtacttaatggtactagcgcagctttgagttcaagggagagagagttgggtctgctaagttgcgggttcatccatgaagttgttttgtgccctgtgatctaatatagcttcaactcagaagctggaaacattactctggaatcctgtgtctggcagtgtgtcaagcagccaggcccagatggagaatccaggtgtatgttggcaaaaacagggtaggtccaaatggagggtggtggcagactgtggaggacttacttgagggctgagctggtggctgcagcatttttatgggatgttccctatttgtgtgggaagacaaccctgaaggtgaatttgtgtggagagaaaacacagaagggcagcaacacagcataagcacaagtcaggggaggctgtgacatcagatgggcgctgaatgcttgtggctgggaggacaggcaaggcccaaaggagtagctctctttttgttgttactgttgttttgctcttcatggataaatttgttctacagcagtttttaagattctattatatgtggagtaccatttatgaggatacaaaatacaaataagaggatgtcctcaagttggatacagatagtgaaacaaagtttacaaataattacacaataacatgacgaagtctatagtggagccaaacaaaaaggactgcaggaacactaaggggtaagctaaaaatcctgcctgagagaattaagaaaggcttctcagaggagataacatttgagctgggtcctcaagaatgaacaggaattctccagtgggaaaggtcactatgaatgcaatgattagaactacttagtaagcgtacaaaaaaaaaaaaaaagagaggataatagggctttctgacactacttttccagattcgagggtatctagtttgtttcatcactctttaaaaagaagcccaaggtatcttaaaggatgaaacagcgcctcggtgctgctcttcatcatagaacctcacctcatgccatggcttggaaagctctgcaggcccaggcgtgtcctcttatactcagaaaacaacccttcaaggtcatcaattccatttgtattcttattggacattgtttggagcatagtaggcattcagtaaatgttctttgaaataagtccatttgttggaatgtcttgaaaatattttttgagggtggttgtattttctttcttgagactcactggcacatgtgtctgtttcaagtcagcaaggctgttccaatttttgtcttaggagttttactttctgtatgcttttttgcctcatttgggagtttacattatttcaaaatggatagagactgtagaatagagaatcccaaaatcacaggacaattgaagttcattgacaaggatagtgagaaaagtgtgctctgcagaatattttactctgagtttctctaatgtaattagttttgagtggggaagaaaacccaacattcagcagaaaggcaggaatagaggatcaatctaatacatcacagtggagaatgaggctgtgttcaggccattctgcatactccgaaactcttaagcacaactgactctgcagaaaatatgtctgtctcaaacccccgtttactgtcagttcttttggatacccagatactaaccaccagaataaagtccagcccaaatctcagggtttctggactgtaatactagttagctccattaatacttgccttcatctgccaagaagatatttaaaagtcatttgcaattatgggtccatctcaggtttggattcattttcttaagggaagtatttggggactactgtcaccccatattgtaaggtgaagacacaaggcaacaggttgagtgaatggtggccctcagtcatgctgggtctggaggaagctgaaagctaggctgagattgctacttagtttgtgtagtttgatgttaaagcatcatcacgtttttttttcaggcccaggaacaggatttagaagcttcaggttttcccttcctgtaaggtagccttgatacctagatgttgtgatttcctttgtggagagaaacaaacttctgggcctgtttctacccatctgctgttgggttgaaagcacagctctcatcatgtttctttccttccgaagtgtctgatgtgtttctctgctgcctctacaagcacccattttcttctgtatccagccttgtggcccttatgcctaccctgttttggttctaaacatgggaatacctcattttctcagtgcttttcatccattccttccatctcaagtgctgaaaatgtctcagaagtcctagaccttgataaaggttattggccatgttattctcatctgtctgctcctgctctgctctgaacagttctggaatactaagacagccatacagtagcagccaatatctttggatgagtcttcttactttaattattctgctgaatggacatatgctcccctcactttcctcccccaccatagctgtccaaatctatttgaattccgttaacttcacgttttctcatgccctgattcagtctcttatgcctaaatttagtctcgaagcatgaaaccataaaggattctccagtccaccctagaactctggacattaacttaaaatctgttcacccatatcaagcctgtgctgtgctcagcttatacctgtaaacactgatctcttctctcctactctaatacaagttttatttgtatcagctctgccctgggtactccaagaataggatagccaattatcctctcataccttatcttctctgacagagaaatcagagttcttgcattttggtctccactgagaaaggcaattctgtgactgcttgccacatggctccccaagtcctgctcaagttctcacctccttcacaaattgttgatgtatgtgggccttgtctcttcaactttatggcaggctcgtagaggatacgtatcttcataacctgtaagtcccactgggcctagaatgttactaaagcactacactttttctcttgagatggagttttgctcttgttgtgcaggctggagtgcaatggtgcgatctcagctcactgcatcctctgcctcctgggttcaagtgattttcctacctcagcctctcgagtagctgggattataggcatgcgccaccccacctggctaattttgtatttttagtagacacggggtttctccatgttggtcaggctggtctcaaactccttttttttttttttttagcaatattaacagatggaacttttatttatttatttatttatttatttatttatttatttatttatttttgagacagtgtctcactctgttgcccaggctggagtgcagtggcatgatcacagctcactgcagcctcaacatcctgggctcaagtgatcctttcacctcagcctctcaagtagctggcacttcaggcatgtgccaccatacgtggctaattttttatttatttttatttttttattatactttaagttttagggtacatgtgcacaatgtgcaggtttgttacatatgtatacatgtgctgtgttggtttgctgcacctattaactcatcatttacattaggtatttctcctaatgctatccctgccccattcccccgaccccacgacagggcctggtgtgtgatgttccctgccttgtgtccaagtgttctcattgttccattcctactgatgagtgagaaaatgcggtgtttggttttctgtccttgtgatagtttgctcagaatgatggtttccagcttcatccatgttgctacaaaggacatgaactcatcctttttaatggctgcatagtattccatggtgtatatgtgccacattttcttaatccagtctatcattgttggacatttgggttggttccaagtctttgctgttgtgaatagtgccacaataaacatatgtgttcatgtgtctttatagtagcatgatttataatcctttgggtatatacccagtagtgggattgctgggtcaaatggtatttctagttctagatccttgaggaattgccacactgtcttccacaatggttgaagtagtttacagttccaccaacagtgtaaaagtgttcctatttctccacatactctccagcacttgtttcctgactttttactgatcaccattctaactggtgtgagatggtaactcattgtggttttgatttgcatttctctgatgaccagtgatgaggagcattttttcatatgtctgttggctgcataaataaatgtcttcttttgaaaagtgtctgtttatatccttcgaccactttttgatggagttgtttgattttctcttgtaaatttgtttaagttctttgtagattctagacattagccctttgtcagatgggtagattgcaaacattttctcccattctgtaggttacctgttcactctgatggcagtttcttttgccgtgcagaagctctttagtttaattagatcccatttgtctattttggcttctgttaccattgcttttggtgttttagtcatgaagtccttgcccatgcctatgtcctgaatggtattgcctaggttttcttctagggtttttatggttttaggtctaacatttaagtctttaatccatcttgaattaatgtttgtataaggtgtaaggaagggatccagtttcagctttctacatatggctagccagttttcccagcaccatttattgaatagggaatcctttcaccatttcttgtttttgtcaggtttgtcaaagatcagatgtttgtagatgtgtggtgttatttctgtggcctctgttctgttccattggtctatatctctgttttggtaccagtaccatgctgttttggttactgtggtcttgtagtatagtttgaagtcaggtagcgtgatgcctccagatttgttctttttgtttaggattgtcttggtaatgcaggctcttttttggttccatatgaactttaaagtagattttccaattctgtgaagaaagtcattggtagctggatggggatggcattgaatctataaattaccttgggcagtatggccattttcatgatattgattcttcctatccatgagcatggaatgttcttccatttgtttgtgtcctctttgattttgttgagcagtggtttgtagttctccttgaagacatccttcacatcccttgtaagttggattcctaggtattttattctctttgtagcaattgtgaatgggcgttcactcatgatttggctctctgtttgtctgtaattggtgtataggaatgcttgtgatttttgcgccttgattttgtatcctgagactttgctgaagttgcttatcatcttaaagagattttgggctgagatgatggggttttctaaatatataatcatgtcatctgtgaacagggacaaactgatttcctcttttcctaattgaataccctttatttctttctcttgcttgattgccctggccagaacttccaacagtatgttgaataggagtggtgagagagggcatccctgtcttgtgccagttttcaaagggaatgcttccagttttttcccattcagtatgatattggctgtgggtttgtcataaatacctcttattattttgagatacgttccatcaatgaaacagactttcaaccaacacagaccaaaagagacaaagaaggccattacataatggtaaagggatcaattcaacaagaagagctaactatcctaaatatatatgcacccaatacaggagcacccagattcataaagcaagtccttagatacctacaaagagacatagactcccacacaataataatgggaaactttaacaccccattgtcaatattagacagatgaacgagacagaagattaataaggatatccaggacttgaactcagcaatgcactaagccgacctaatagacatctacagaactctccaccacaaatcaacagaatatatcttcttctcagcaccacatcacacttattccaaaattgaccacattgttggaagtaaaacactcctcagcaaatgtaaaagaacagaaatcacaacaaactgtctctcagaccacagtgcaatcaaattagaactcaggattaagaaactcactcaaaaccgcacaactacatggaaactgaacaacctgctcctgaatgactcctgggtaaattagaaactgaaggcagaaataaagatgttctttgaaaccaatgagaacaaagacacaacgtaccagaatctctgggacacatttaaagcagtgtatagagggaaatttatagcactaaatgctcacaagagaaagcaggaaagatctaaaattgacaccctaacatcacagttaaaagaactagagaagcaagagcaaacaaattcaaaagctagcataaggcaagaaataactaagattagagcagaactaaaggaaatagagacacacaaaacccttcaaaaaatcagtgagtccaggagctggttttctgaaaagatcaacaaaatagatagactgctagcaagactaataaagaagaaaagagaggagaatcaaatagatgcaataaaaatgataaaggggatatcaccatcgatcccacagaaatacaaactaccttcagagaatactataaacacctctatgtaaataaactagaaaatctagaagaaatggataaattcctggacagatactccctcccaagactaaactaggaagatgttgaatccctgagtataccaataacaggctgtgaaattgaggcaataattaatagcttaccaaccaaaaagagtccaggaccagacggattcacagccggattctaccagaggtacaaggaagagctggtaccattccttctgaaattattccagtcaacagaaaaagagggaatcctccctaactcattttatgaggccagcatcatcctgataccaaagcctggcagagacacaacaacaacaaaaaaagaattttagaccaatatccctgatgaacatcgatgtgaaaatcctcaataaaatactggcaaactgaatccagcagcacatcaaaaagcttatccaccatgatcaagtgggcttcatccctgggatgcaaggctggttcaacatatgcaaatgaataaacgtaatccatcacataaacagaaccaaagacaaaaaccacatgattatctcaatagatgtaggaaaggcctttgacaaaattgaacagcgcttcatgctaaaaactctcaaactcctaacctcaggtgatccacctgcctcggcctcccaaagtgctgggattacaggcgtgagccaccacacctggcccaccaaagcacttttaaaagtctttactggctggctgtttggtcacaataatgtttatagtgaatatgcctttttctttaataaacacatttaacgttttaaagttctttttctgaagagtgatttttggttttgattgttgatagtggccttgattcatgccaaacttataaaaatcctggtcagtttatactgagcttctgcacatagagttttatataaaaccaagactttgtatttgaaggatggaatgttgatttaaacaccttttttgtacataatcattttagaatttgaagaggaaaaattaacaaagcttgtcagattacctttcagatttctttcttttgttccctaatattaccttgtaacaataccatctccatctccgtatgcttctagatcacattaattccacagcaaactttatattatcagacataatttgaaatgtgatacaacttaaattcactgtgccagctcagcattcctaattcatgttatctgcagtgtttgaattatagttcagatttattggaccagagaatgagaaaatccaaattctctagaattgatttcttacatggaaaggctgacacagtgggagatgtgttgctgtttaaaacagaactttgagacctccccacccccgttcagtgataagagaatgaacaatgcattttaatggaaaaattgaagtaaagcaagatagttcaaattaactggagaaccatgattgttggttccagaaaaattcactgttgtattctcagtgtttgaaaatgactgtcacatgataggcactcaattaatttgttgaatacatgactaagtgtattataagccaagagaagttttaatatgcttattacatgtttaatacaagaaaagcattatctcaatttattcaggatatagtaatacatagatgatcatttatactgctctaccttgatgaggcctctagctttccactaaatgtttgtcacttatgatagcaataacagtaatagaagtagcatctagcatttatgtaatactttttatcatttagtaagtactatttatttattaaaatgcacacatatatgttctcacttgtcttcagaacaaatttgagtgctcggtggaacaggttctaaacaaatgtgagatccctcttctcccactcctggatgttggccttgtatggtaggaagggcaggtatagttctttgattggtgaggaaactaaaaatagaaagaatagtttatgggccaaaagccacactttaattttgtaataaacataaacctaaattacagataatctgacatcttttccactttaaatttattatagatttaactgactttacatttcattcaataatttctttgcaatgtcactgaaatgcagtgacagatgtatatttaaaattactataaagcccatcttgaataaaataaagaagtgtaatatatagtagataagaaaatactatttttcagagctaagcatgatctgatttttatcagtattttgaaagtatttattcatttccctggataaaagactgtacgtgatttggaatataaggaaaggaataggtgaagatgtcccttctgaactgttttttttaaacttggtttttgaaggacccgtttgtttttcgttttcttgccctttcaaataaccagcagcataattagtatgctatggtgttatgggaacaaattatgaataaacaaggattaaaagattgtatgaatatatctttcatacttacttggaggatttaatttcacaatataagatattttaaaaataaatacttggattttatcctggaaattttcatattaatgaaagaaagaaaaacctatttaatgagagctttaagattgtatcttatgggaaagtctaactttaggtataaaaggatcagttttattttgagatttttggctaagactttacttaaagattgctttgtcagaactggagattttaggagtgcctatgacttgacagaaacaactgggatagactattctgatgttctttaatgtttaattggtaattctaagggaagaagaaatactttggtaagttagatgcatggtccagctagcttaattatctgtcttgcgtgctggggactatatggagagtgattcctgtccatcatagtattggtctcaaaaggtcaatttctagttcagacagcttcaggtctcctttggtctccaggatttgcatatttatctgttttatctttagttttgatggaaaaataatgcgtataagtgaacatctattaagataatagctttttgttttcgaaatttctcctaaattataaggcctgatacgtctagagctagtatttgaacattcggcacaaacgttaaatttcatatgtttagaataattagttcttaaattcaaaagatatttgactagccaaaacgtgatgtctgactttataggagatgatgagcatttaggtgatgatgtataagtgaaatatgtcctgaaaggcccctcatagaattggttttactgagtaatactttggtactaagtccttggctcaaatcaagaaaggacagaaagggaaggcacacagttgtatttataaggatgtcgttgaagacattggttatatatcacacaatttcccttttatgaaaacccttcagtgtatcttttttcttttatcttttccttttttggggccagtctgacacgtgaaatgatgtcttgttatttaaatgtacatttcttttgattgctagtacatgttttatgtattgtttttattttatttttttaacaaattgccctgctaattttcttgctatttttccaattgggatgttcatttttttcttatggactttcaatggtacttgtgtattgcaaggagattaatcttttaccatacatattctaaacatttttctgctttctctaattttttatgtgttttttttatttaaataaaagtttgggtttgtttttctaagtgaaaatgaggccagccatcttttgtttgctttcatttcctttaaagattatataagtagttatcaatattttctccaaatacttgtatttttgttttttgtttaaaataaatatcaggttcctatctaaattttacatttaaatgcagaatataagcctcatgaaggcagcaattttgtcgattttattccttatcgttggctgtattcatggcacatcataggcatgtaatatgtatttttcaaatagatagtataagtctttatctaaactttatattgttataaaaatgtgaatagaaatctagctttcttaacctttttagaaagctggacatgtacttttaagtcatatttaagcctgctgtttttcctctgtcccgaaattcttcctcttgctttccacctatttctgtagaaaatccttctgtggtaatacaccgacaaggtcataatttacgtttcaagttttcctaacgtgatctttctttgtagcacttgtcatagctgcagtttcatgattgtttgtggaattatttaaatgttcttctccccgcttccaccctacaagccaacattagtcagggactttacttatttttgttcatcatcatatcccactgcatggcacatattagataattaataagttttttttaaatgagcattttattttttgaatagactaataaactgccacaaaaatcacataccaagtccttgcacatattcggtccccttcaagacttttacattttatattattgatctgtctgttttgttatcagtcccatacaaatttaataactatacttctaaaaacattttagtatttcttaggttatagtggcttcccatatactctttacaacaggtgtgtccaatcttttggcttctctgggccactttggaagaagaatttgtattgggccacacataaaatacactaacaataacgatagctgatgagctttaaaaaaatcacacacaaaaaatctcaatctcataatgtttcaagaaagtttacggatttgtgttgggccacatgtggcctgcagaccatgggctggacaagcttgctctacactaattcacacagtttaaaacattttccaactattctcacatatttatcttctggttgtattttataatcatttgtcaagttaaaaaaatctcattgtatatttataagtgtgcgtgtgagagagagtatgtttgtgtgttggtttgcaaggaaggatttgttttaaatttgtaaatcggagagaggttgtgtatttataataaaatattccattttcttatttaggagcttgctatgcggcttttaatttattgaatgcgttgtcgggcacggtggctcacacctgtaatgccagcactttgggaggctgaggtgggcagatcacctgaggtcaggagtttgagaccagcctggccaatatggtgaaaccccgtctctattaaaaatacaaaaattggccaggcatgctagtgcatgcccatatccagctactcaggaggctgaggcatgagaatcgctcgaacctgggaggcagaggttgcaccactgcactccagcctgggcgacagagcaagactctgtttcaaaaaaaaaagactacttacgaatttattgaatgcatttatttctctcagttaatttaaaactttattttatagaacctaaacttttcatgttaggatttttcttagacattttcatgcagaaactagttaacatagcaagctcgaatttgctatctttagaaggatttgcttacagggttggcttgtccttggctgtcatctgataacttgacttcagaatgttccctgtggtactaagtgataaggttatttggtgtaccaggggtactgaatttcattgtgccaatctgcctagacttaaaaaaaatgtgatttatacttccttctgggattttttaaaaatattgtggctgagtatgtaggcagagagtgtctgtgtgaccagtccctccaaaatctttgcactcggggtctcaagagatttttccagacagagatgctacacatattactgcatttctttgctagagagcattagaaacttacacacagatctcttcaggtgccacttgatgtcttcatctctcattagttttatcacttttaaatatcttctcttagtttttcctgatagtcccaatattgtcatctctaaatgaaaattctgtgtacttttttacaatatttatccttcacattcatttttcttgtcatattacagtgattagatcttccagaacaatattgaaaaatacagttgacttcaaaaacttttattttcaatataattgtgatagtgttttatattagatatgttttctattatctttagtttgatattctttatcatagtaagaaactatcccttaatgtctagtttatttagtttcattagaagcacacaatgcattttaagtcttttttgatacctgttgagacaacccaatttttttgtttctttattaatgtgataaattgtttcacatatttgaaaagccttatttaaaaagagtcatgatatcgctaactatcctggcgataaactatccatattattttaaatgattttaaaaccttgctatggaaaataagattaacttaagtagtaggcttattgtaatttattgccacttaaataatagaggttaatagaaggatgcaagaagagagccaacttgttgtatcatggagaaaaataattgtaagtattaataataataaataaaaataagactgtttagcatatttctaaaggacattctcaaataagtaatctgtatttggtatctgttggccaaaatatatattttctgtattttagcaacacacacaaagctatgtgtgtgaatacatttttataaatcgatgtatttttgatacaaaaaagcctgttgcattcagacaggtgtttttgaagcactgacatttgcttccagctctcctacttttactttcaatgcaatatgatgaaataaaccattttatgtatactacataattgccacaatgtccatactggtaatacttgattgttaatactgatagagcatgagacagcatgatgtcataaattggttctcatcttatttgctctgtaattggtcatgatcattacagatgatttcatcttgctaggatttgcttcctttattctataactatattactaaaatgacatagtgattttaaaatttacagttaaaatagagaaaaatgttcattttaagcatgtatgttttaaaaatcatatgtattattattttacattgtattactaactacactgtcatacttattactgaaatatatgtatgagtacgattatagttttttgtaaaaatattgtattcgtctgttctcacactgctaagaaagacatacctgagactgggtaatttatttaaaaaagagatttaattgactcacagttcagcatggctggggaggcctcaggaaacttatagtcatggtagaaggggagacaaacacgtcctttctcacatggcagcaggaaggagaagaatgagtgcccagtgaagggggcagccccttataaaaccatcagatcccatgagaaataactccgtatcatgagaacaggatgggggaaaccatccccacgattcagttatctccacctggtccctctcacgacacgtggggattattggaactacaagataaaatttgggttggggacacagccaaaccatatcaaagtttaaatattttctcacaataaagagaggatatatgtaagtaaacataaattctgagatttaattgaaatttagtgaatcatgtttttcttcagtgttctttcacataagaggtaattttttttggcttaataaaaatgtctcttatctttcctttacttcttccatctttctatctgataatgtggcaaaaggcagcttttgaaaacaaacaaaatactacagtaaaagcatattttttctgatttctatcagctatgaatatctagcattaattttcctggtagaatgtttgatgactataaagaggagactggtaagaaggagaagatgcaccctccacacaggtcagtggggaggcggacttacaagtacttttagtgctacttttagggcggtacaaagttactgaaagcctaggaggtctacttaactcggcatcagatgttacataaagtgttatggaggctgacgtatctgaatttcagcattgcttccatctcctctggtaactggccccagtaaacctatctaacattattttctagtgtgtctatattaggattctttagagaaacaaaaccaataggatagggtgtgtgggggggtatgtgtgtgtgggtgtgcgggtgtgtatatgtgtttgtatggaacctgagtttttgaggaggtatttttaagcttgaattgaccgaaattggtcatgatttcagggaaggaaaaattgaatcacaggaagggttaagagaaaatgtacatgtagagggtgtgagggagagggaaaaattcattgtgattttgaagttcccagtttggaagatggagtaaatgaatcagatatgtcaggaaacacatggaagttgagttttgtatatgctgcatttgagatgcctgaggagcagttaggaatgcatatctggagaacaaagaggtccaggctagggggaaagtgaggtcttcaacttaaggcctgtgatggagccaggtgagaagagaacatctaaggacagcatgtaaagctatatgaagccctaagagtgtcaacattccttgccctataaatgtttgattgcctgattagttatattcataatgagttctatgtgaagcaaaagaaatgggaacatttgattaatctgcaagattccattgacattctcaaaagtaaattgtcatatgttaaggcagattactaaaatggaattctttatgtgtatcagcatgactgagcgagttaactaatctgtttgacactcagcactcatctatagacaacccaaccccatgattggtcctactatatccacgcttgtcttactataaaggaaatctctatgtagtagcagcagaacttttttttttcttcctcaactaaatgtgatgtcaatcctgtataaaatctcacttctttccttggtccctgccaacctatctcatgtctttgctcatttgactccagctgaaggaggcttctttctgttcctgcccaagggcttgtgcatatggtagttactcaataaatacttatgaaatggatgaatgactctgccttgtagatttgttctgagaagtaaatgtgaaaaagtatatgaagagcctagtgatgtatctggtacattagagatgtgaaataaatgcctcttttgaccattttaattttttgtttctccaaatctgtaatcctgacatttctgtcgtcttctgctgcaatctactttcccaacccttctcatccagccagcttactgtctttggtttcggcacccccacaggccacggaccatgtatgatctcctcagtttgtacttcagtgtgaactgaagagatcacagtttcatacacaaggtttttcatacatgtaatctcttgagttaccctcttacacttcaataattacatatggattcctagtcccaaggacactgagcatataagtcgttgtgctggagattctcagaagaatgggtgtcctctggggacttggtcacagacctaaaaagggactctttaccagtcacaaagcactatcatgatcacacccttattatatggatttggaatcagcacttcataaattgtagccaacattgattgaacaccaaatatgggtcaggcagtgttctaagcacgttacatatatcacttgatgagtttggttttattggtattcctgttttatactcactaacttgcctaagatcacgctgctactgatttgcaagttaggatgtaagcccaggtggtctagtttcagattcctgtccttacctatgctttttattcaatactgcctcagcagcagtttcagggtcatagagttaacatctgttctttagtgtttgattctagattttaaaaataatttaccattttagttttcaaataattctaatagtttctttctactcttttacctaccactttaagtctttattcccatagggcagctactgttaacaatattttcagaacctttttcatcataatttttttgtaaaacatcttagtggctttgtgattccccctttcagttgtttattttctgaaagttcagcttattcttagttcatgaaagttttaaataccagtggtccaaacacaactccggtatgttcatgtgtgtgcctgtggatgttccacctgtgtccgaggcagatttttgaaattaattaacttcttacctgtttggaacttatttacatgagtttctgcctgaaggagatgtacttctgtttgaaaactccaggttgatgaatttttcgggttgccaggactcaaacttatttgacaaatcatctatgaccctatcaccttgatgctcagaaacaaatgaaccaacagcccttcctgactaaggaaacaggttttgatggagttttcaatgcatggctttatggactcaagaatcaaatgttttctgaacaatgtgaagaaagttttgtttctagatccttatatgttcctgtgtctccttttctgtagaaaagctctgcaatttttaatcagtaacacaaaaatgcctccatggaaatgtccataattctcagcgtgcagtggaacattttccgaaaaagtgaggtcaccagaagcacagagcagagaaatcccagatggcactaatatttgatttcatttttagcacgctcatattcagcagatggattggaaggctgacctctctgacacttctgcatcactgcctgctactccaattgcctttgcgaatgttttttcataaggcatctcctggtacctcagagattgatgcctggtcgcctgcctgtgttatgcttcatttcgccaggattctgtgtggttgagagttgctgtattctataaaaggggaaatcctggctcatcagtatctcaagcttttcctacagtctctcaaattgcgtgtaacgtctcggagcatatcattttagctttctaggtgtacccctgatttgtatccatctttaacttatcctagtctaattttctgccctcttttgccatcaaaaataatagcaaaaacctcaattacttttgcagcaacctaaatagctaagccaagaataatgtaaaaaaaaagttaaatgttttcaaaatacctactaagtacaaaaatttgattattttaatatgaacattgctgaatctcctccttgagctatagtttcagtggccaaaagcaaagacctgagttagagttcccaatcatgctgttttctttaagggtaagctctactttagagtaagtgtcagttttcttatttgtaaactagtgatattattcgtgccaggcagttaggattgatgtgaagattaaatgaagaaatgaatgtcatatggttgtcacagtctgtggcacagagtaaatatacaaagaatattagtttgtggtgtgcaaaataacttttgtatgtataatataaataaaatataaaataaatggtaaaattattttgtttcattattacttagattgtgagtaaagtgaaatgttaagaattttttaatgttcacactaatgctttattttaaaactttctataaaattactgtattccttgttatggaccattatgttgtccacacatctatttagagatgaccctcttctccctcctaccctcacctgctagtttatatttcagtggcgtggctacagacaaggaactatcagataagatgagtatccagtgggtttttttttttttttttccaggcaggttgacctatgtggccatttgttaaagttctctgagaatgctcaattctgaggaggattaggttgctatgtccttccaggttgcttgttcccacacagccagattctggtacatatttgaatgcatagcatacttttggcttagaaaacattgcacatttagtagtcattttgcttgaatcagatctctacctgatgtcattttgatgaatttagggtttagatgactaaattgcagctttgttgtgaaactttctatagaaagttatttttttcctttttttaggtctaacataagaccagactatgcagactccaatttccacgacttcaagatgcataccttcactcgagtcacatcctgcaaagtctgccagatgctcctgaggtaagcctgctcagtcctggttttcagtttaaaggaactgatataattgctaagtgtttcagacttttctaaccttctagccaataggttctaaagtggggaatttgccttagcagtctggatcccacaaacctttgccaggctttctgcctggacagtcctttcagaagctctggcaagctcgtctccctctaccaagggggtaccttgaagagcactgttgatactttttttcttcttcttgcagtaatttcatatgggcagaattttgcaccgtttaatataccactttcttatttcacctttcaggggaacattttatcaaggctatttatgttttaagtgtggagcgagagcacacaaagaatgtttgggaagagtagacaattgtggcagagttaattctggtggtaagtcatgtttattgttgcaattctgtttttaatgaggacataaaatttgctaaacataattaaggcctaatttactctgaatatgtgtttattgtaacatatctgcttttgaaactattatttataagcacaattagaaaaatgcttaaaatttacgtgagttttctgcataactttgttttaaattatttaaaatttgtgtgacttttatacatatcttggagacagaggtcttcaagagggagttggatggtttcatgtcactcatttctttaaaagccctaaataaatgactaaaaccatacaaacatagccgaaaaaatagagtaacaaaaacaacagaaagaatatattcttctatctttagttcttaaatttcctttttattcttttaaatatttagctcaggaatgctaatggctccagaagtaaacatcacacagactaattcatgaattaatgaattgaatacattgtcattttgcagcacttaaaaaagagcatatatcttttgggttttatgtaaatattttccccttggtttttaaaaataatgctgcatgattgttacatgagctagtttctaagatggctggcagttatgcattcagtagcctattgcctctttctgctcctcttgggctctcttccttgtctttattttctggcttctttattcttccctttcttcttttttctctttgtccttttcccccgagtttctctgtgtttttatcaataagacctttcaaaatcagtaaaacttttgaacacaagaaaggatctttaacagcttgagttcaaaaggtagccatgtcaacctttgattttcccaaaggaaaaggtggacattgaattattttggataatgtgaaaaagagtgaaacagagaatagctcatttcggagctgagttcagaaaataggcaattgtagaaaaggtgaatcctattagacgactgagatcatagcacattcctctcagacattttaaaaggaccctctgtgccattctctgtgctaggcatgagcagctataaagtgacagatcttggcatgagttgagcacctacactgtgcctgtcctgcctgggtgctctactgggcatcttcttgcatgagctcattccgtcttcagaatggccctgcacatttactgatgggggtcggattgcttatgcagtttactcaagggctgttaaataaacttacctcttacttctgtcggaaagtcagaaacagtttacagagttgtaaaatataatagaaataaaaattattgttgttattctttaattgccaccccaatagaatttatcacttgaatttttgttgttccatctttatatgccccattctttaatctctttggagacagttaacattttatttgctcatagtaggctaatgtttatataaattccaaggccctgtcttgatgagatgatatctgtgaagaatgtaaaatgatcccatagttggcatggttctaaaggaaatagtgtaggagaatagtttagagtcaagcagagatggttgaaatgctagctttgcgccatttgttagctatgtgagcttggggaatttacttaaatattctgagcttttgtttattcattttgtaaattagacgattattatgaggatacagtgagataatgttgattcttaccacagtacctgagcaaagtgagaacttactattttaatctaaggtgatatagtgaaaaatcaggttttttttttttttttgaaagacgtgggcttatttagtatttttattgttttcatgatctggagtacacgtggatgggaacgttaaggagcaccaaactttaaaataatacgcaagtatggcattaaaaggacataaaattttttaacttttacgttataaaagtcaataggaaatcattgaaaattcctagtctagtcaaatagaagagtcatatattctcagtgtctgttcctaggtaattatttcaatgtactctgtccttacataagtcattttgtctatggcagtaaaatctacaagctctggagtcttggtctgtttgaatcctagcttcacaatttactccttgggtgattttgaactccatttacttaccctttgtaagtattggtttcttcccttatgctatggtttggccctgtgtgcccacccaaatctcatcctgaattgtaatccccacgtgtcaagggaggggccaggcaggaggggattggatcatgggatttcctccacgctgttctcatgatagtgagtgagttctcatgagaactgatggtttcataaggcagtatttcttgctcttgctctctgtctcacttgtcaccatgtaagatgtacctgcttcaccttctgccatgattgtaagtttcctgaggcctccccagccatgtggaactgtgagcaaattaaacctcttttctgtataaattccccagtctcaggtattacattatagcagtgggaggacggactaatacagtaaattggtacccagagtggggggcactgctataaagatacttgaaaatgtggaagcgactttggaactgggtaatggatagaggttggaacagtttggagggctcagaagaagacaggaagatgtgggaaagtttggaacttcctagagacttgttgaatggttttgaccaaagtgctgataatggtgtggacaatgaagttcgggctgaggtggtcccaaatggagatgaggaacttgttgggaattggagtaaaggtcactcttgctgtgttttagtaaagagactggtggcattgtgccccaccctagagatctgtggaactttgaacttgagagagatgatttgaaattggaacttatgtttaaaagagaagtggagcataaaaggttggagaatttgcagcctgatgatgcgatagaaaagaaaaacccattttctggggagaatttcaagcttgctgcagaagtttgcataagtaatgaggagctaaatgttaattgccaagacaatggggaaaatgtctccagggcatgtcagaggtcttcatggcagccccttccatcatggtcctagagtcctaggagagaaatggttttgtggactggatcaagggccccactgctgtgtgcagcttaaggatttggtgccctgtgttcccagctgctccagccatggcgaaaaggggccaacgtacagctcaggctgttgcttcagagggtgcaagccccaggcctttgcttcagagggtgcaagccccaggcctttgcagcttccatgtggtgttggacctgtggatgcacaaaagtcaagagttgaagtttaggtatccgtctaacaaagatctaataaccagagtctacaaggcacttaaacaaatttacaagaaagaaacaaacaaccccattaaaaagcaggcaaaggacatgaacagacacttctcaaaagaagacatttatgcagctaacacatatatgaaaaaaaaagctcaacatgactgatcattagagaaatgcaaatcaaaaccacaataagataccatctcacgctattcagaatggcaattattaaaaagtcaagaaacaatagatgctgctgaggcagtggagaaataggaatgcttttatactgttggtgggaatgtaaattagttcatccattgtggaagacagtgtggcaatccctcaaagacctagaaccagaaataccaactgactcagcaatcccattactaggcatatacccagaggaatagaaatcattctactataaagatacatgcatgcgtatgttcactgcagcactattcacaatggcaaaagcacggaatcagcccaaatgcccatcagtgatagactggataaagaaaatgtggtacatatatcatagaataccatgccgacataaagaggaatgagatcatgtcctttacagggacatggacggagctggaagccattatcctcagcaaactaatgcaggaacagaaaaccaaacaccacatgttctcactcataagtgggagctgaacaatgagaacacatggacacagggaggggaacaacacacactggggtctgtaagcagggtgggggaaaggagagcatcaggaaaaatagctaatgcatgctgcacttaattcttaggtgatgcgttgataggtgcagcaaaccaccatggcacgcgtttacctatgtaacaaacctgcacatcctgcacatgtaccctggaacttaaaataaaatgaaataaataaaataaaactttaaaaaatgcttattgctcatggccacttgtcttcaggccataaggaagttgaaagttgactgcatagaccatgaaacaatgttcaatcactttggcttttgtaagcttacctttttaagaatacttactgacaaaatttgatttaaaaataaggattcttatctctagagtcttcctagctgtttaactcagctttggcatgctgccttgccaacaactcacttgcacttataatttaattgtagtgacatagacagcagattttcaaagaactgaaggtggattttcaaattcctcagcctcataacctttggtgtgtgatcatcctggcccaccttcaccaagaatcctatcaagtcagtttagccggaatcgcccttatatgtgatgtttcctctcactaattttccatccattgacctcaccctcctccttggctataaatctccacttgtccatgctgtatttgaaattgaacctggatttctttctcctttgcaattgttcctgaataaaatctgttatcacaacttaaaaaaaaaaagagagagaaagaatcgagctttgggaagctctgcttagatttcagaggatatatggaaatgtctggatgcccaggcagcggtctgctgcagggtcagggccctcatggagaacctctgctagggcagtacagaagggaaatgtggggttggagctcccacacagagtccccactgccactgcctagtggagctgtgagaagagggccacggtcctccagattccacaatggtaggtccacccacagtttgcactgtgcctggaaaacccgcagacactcattgccagcctgtgagagcagccaggaggggggctgtaccctgcaacgccataggggcagagctgcccaagaccctgggtgcctacctcttgcatcggtgtgacctggatatgagacatggagtcagaagtaactgccctgctggatttcagacttgcatggggcctgtaggccctttgttttgatcaatttctcccatttggaacaggtgtatttacacaatgcctgtacccctattgtatcttgggaggaactaacttattttttattttactggctcatagttggaagggacttgccttgtctcagatgaaactttgaactgtggacttttgagttaatgctgaaattagttaagactttgggggactgttgggtaggcatgattgtgttttgaatatgaggatgtgagttttgggaggggccaggagcagaatgatatggtttggctctgtgtccgcacccaaatctcatctcgaattgtaatccccataatccccacatatcaagggagggaggtgattggatcatgggggcattttccccatgctgttctcatgatagtgaataagttctcaggagatctgatggttttataaggcagttttccctgctctggcttgctctcttgcctgcctccatgtaagaattgcctcttttgccttctgccatgattgtaagtttcctgaggcctccccatccatgttaaactgggagtcaattaaacctcttttctttatgaataacccagtctcaggtatttcttcctggcagtgtgagaatggactaacaccttgtaaaacagggccaataataacacttagattttaaaatctttttaagcaaatacccctatttagtgccaggtactgttctcagtacagctgctcctccattaatgatggggttatgtcctcattaagccattgtaagtggaaactatcgtaagtcaaaactgcattcaatgcacctaacctattgtacattatagctttgcttatcatactttaaacatgctcacagtacttgaaatacagttgggcaaaaatcatctggcaacacagtacactgtattgtttgcttccccttgtgatttcgtggctgactggtagctgtggctagctgctgctgcccagcatcatgagtgagtctcattgggcatgttgctcgcccgggaaaatatcaaaattcaaatattaaagtctagtttctacggaatgcatgtgactttcataccgttgtaaagtggaaaaatcataaatgaaccatccaaaattggggaccatttgtactttaccattgttaactcatttactcctatataaattctgtgaagttggtattattgacatcttacagatgagaaaccaaggcacagagaaatatgcaatctgtctaagtttcttgttcaatacaaccaagattcaaatccaggcaggccagcccctaagtttgttcttaccactgggctctgctaccagttacatgaatgatctgtgatgatgatatgtcagatgtgtcaaaagcccagtactgaatcctagtaagtaatcatgtgcttgcctttctcagtgaaagggagtgattttctaatggttttttaggcagaacactttaattaaattagtaactacccagtgtttttaggtttgaatgttctgtagtgctgcgagaagacatgcatccctggggaccatacctaccttcttcccatggaaactctcaagaccggatggacttaagacacattcagttctagggcctcttattttaagatgaagaaacaaggtcataaatatatgaaaataagataactaagaataatactgttagtgccctgcagattgtagataatgcttactaagatatcctcaattaaaaagtagcatcattctctaaactttggtatgtaattcattacaaagcaggaaaatgtttttttaaaacctctggctaaatttgctttttggagtttgtaacatactctcttgctcttttgattcttttccctgttttgcatatttccattgacctccattccccttctgttttatacgttggtgccctttctctccctctctccttcttttaagttctttcctgctcaagattttgagagaccggtaacaccgaatgctcatagttcattagcggtatgaaatggtaaggacctgcctaggaggcttcctttttttactctcagatcggggtttgctgggtagcccttataaggggcaatgtctttagggggaagaagaatctctgtatcattccatcagtagcctgtaccttctgaaagctggaagccatggcatcttctcctcaccctcattccttctcaccctggtataggtggtaactgtgggtagagtgtgagtttgagcttggtaggtctgatgtgagtgtggtaaagtaggtactattttgaagtcttgggcaagctagactttatgagctgcttctcagcttctcaagctcaacattgacttaagtcttgtgtgatcctttgggcatccaggaataattgcttgctgcagttcagtaatatagtttttcatgactggcctaggatttggaggaaatgctggtgtaggggagggcaggaaaagggataagatatatccaggggatggagacttagtttacttgaatagggcttttgcatggagaagagtgtgatatgatttcagcagaacttgactttgagggaaatcatttcaacagccaaattgaaagcaagggagtactactgacttaagacaaactcaaatgtttacatagatcagacccccccttaatattaaatcataggtggtttgaaattcacccatactttacagagctttatagcaataatgtttaacatagtctaactatactctcaagcaacaaaaagagatcctgattggatcagtgtggatcaggagtccacttgtgatccagaaagctatgactagtaggagttgttataaacattgcatagttggcgtgaaaggcaattccaaaaaggggagtaggcagaggttggttaatggatacagaagtacacccagatgggaagaataaattataatgtcctatagcactataggctgactataattaacaataatttattgtatattttcaaatagctggaagagcagattttgaatattcccaacacaaagaaatgataaatgtttgaggtgatagatatgctaattatcttgatttggttgtaacactttgtatacatatattgaaatatcacactgtaccccataaatatgtgtaatactgttggttccctgcagattgtagataatgcttgcttatacagatatcattgattaaaaagtagcatcattctctaaactttgttgtgtacttgattacaaagcaggacaaaacattttaaaacctctggctttgaatgtgtcaattaaagataataaaataaaaaatttaagagggggagcatgctatctttattcaacatcagacttgtttatagaaagggatagtcaaatggagaagaggtactagttgtacaaaatgacagggtaacccaggggctcaatgagaggtagataatcttttactctaccttttaatggacagatccatggcacatcacatttaggccttaccttacttgacctttctctttcatttaacactgctaatcatcctccttgatgctatccttcacaacccatcatgcgcccatgccatcttctggaaatctgattgactttcctggtttagctacaacccacaccccaggtagataaaggtccatctgtgcatgaaacttctctcctgaagtatgaattttaaattaccatcttctccttacatatcccctcccatgcgtcttgcattgacctcaaatgtctcatgactaaaatcaacctcattagtcattaccgcaaacttccctctcctatgctttgtcttagttaaaggcccaccatccaaacactcacatagacctgggtgtcaacgtcttccacatcttgattcactttcctgttcttcttagctctcctcctaagtctctctaggatgcattgataatggtgttgatatacacagaaaatctcattgtctcttgcttgaacaactcaaaagtttcctaattccctgctcttaatcttattcttacataatttataaaattatcttccgtctgatggtttcattctttcacatactgtactttacatttcttacagaataatgtccaaactttccaatatggcctacaaagctctaagtaatttgtacagctcattttttaccacttcctcctatcccccaacctataacacgactctctttaactactcacagttctccaaccagtttttttatgtctgtgtatctacatgtattttgtttttctattttactgtctttccttcccttttctgtttagtaaacttaatgttcattttcaaaaagtcaatgcagatgttgcccccactttgaaaaccttttctgacactcctaatgcctgggctttattagtctgtcagtcctctgtgctcccctgacatcatatgtttacttttatcacatttattataattgactctatgttcatctcctcaattagactgcagccctctcaatgataggaaccatacctaattggtgttttgacctcaaggaagtagtgaggaatggagtgagtgaatggatcaacaaatggacagacaaatgagtaccactgtagtgtagcagggcttctgggccctgaagatcactataatcttagaatcagaaacaggagagtgcaggggattgtacagttttggttccaccttcgtagagactagagcttgactagattgtggaaaagtggaataaaaaccttacctgagtccctggctggtactttatgaatgaaaggtagaaaattaggtagaccttttagattcctttctagtatttttgcaaggaaaggctcatggcctaagcatcgattgttaggcctttgagaggagacacctgggttagattaataagtagcaagaaaatgaagcaattcacagaatgcttgatgacaaaaatgcctccctttctgaaaaaatctactgcctgatccagtcgatccaattgttagagttctcacttggctcttactatttcctctgcctgaaacatgctcccttttctccgaacagttccaaggaccaccctttcattgctttctgtccaaactctttgccaatcattaaccgtaccttgaccatccaatggtagcctgaattaaattgttctctaattatttctatgtaggctttatgcatttgccaaggttaggctgttctgtggtaactaacaaacccccaggtcccattggctttaagatataaaagtttatttctcacacatgcactgtttactgtgagttcagtggcccttcagagtagctcccttctaatcagggaacccagatcagtttgatcttgtgactttgccagcttgacacatgggttctagggttgctgacttacagacccatagcctggaagtaagcagtgccatttttcatcaagtccattggctgaaactagtcacatggcttcaacctaactgcaagggaagctgggcaatgtaatgaaacacatggactatttggtgtctgtctctacccctgttagattatatgctcctttgctgttcggaatatgtttctcatcttttgtgtccaccccttagtaccaagttcagaggagtggcacttaatatcatgttgttgttgctttttcccataataggactatttcaaccagaatataatttttaatgatgttataggatgtggctaaatattattaagcatttgaagtatctcttaacacttctttttgttcaagttagccctttttggatgttgtcttccttgggttggaaaaccttctatatttcatgctctatatcccttatattaatctagtcttcattcaccctggaaatgataattacttgacaaaaatgcagtgcatttctgaatgaagcacctcatttgtattaatatgtgattatgacagattattaactcaagtgcatttgaagtatgaaaaaaagatgtgttaagtttattttgttaataagacaaactatgcaacttggaaacaaatttgaatgttggatgattagtttatgtcttaacatttgaggatgtgcatggatataaagggcaggcagttccactctccttttccctgaacttgagttgacttcttcacattcactatggcaacctcaatgatcaacacatacaggagctctgaagtgcatgccaaaactttccaacgttaataatgaataggtatgaactccactatgcaagcttctctgaacgagtcactgcaaagctaatgtaattttagggtgtcgtttccttctcacagtacaccaccgcgaaggtctaatcccagacagcaatctttatggacatttgcttttccccccactacactacatgactaagcccctttggtctccacttcttactctgacattgaccagtatagcttgctttgcatcctctcagtttaaacaaagtaacattggaagggaaatactgttggagcaaacgactttggtataatgcatcttttcctttagtgagaatgcaagcctcagctgccctaatatttaactgaagcagatccccatttgcttatctgtttaattgcacttttatctaggccagctgctgctcctgctgctgctatagccactcctaattggaaggacgttgctgtggtatcctagtggtttaaaactgagagactgctacctagaacctgcacccacattggtatctgaaccgggctcctttataaatcatattttacattttaacataaaagataagctttcaggatacaattttatttcagccttctactgctaggcattttatcacagtacttttacgtgagctgaagattgaccattgatttcataaccaaaaatgactttagttctgcataatattacttaaaactcataaagacaattttatacttgagtagttattattccttccatctatttgggtcagtttaatggtacattaataattattaatgtgaattggaatctattatatggttgtattcctattagagcccctgaaaagacttgaaatcaaagcctctttctaagtattatttatagtttatggtttgctttattttctttttaaaacattgctgtatatctgagtagtgaacatagcatttgtgaaagtgaactttctccaaaatttgatcagtccaagcattttttagttgtaatgtctcacagaaatagcactttagtcacgatgatagggtaccttcaaaaactgtactggtaattacttttctgtggcccctgttgagataggcagtcttactggacattgatgtgtttagtctgaatagaacttcagataagagacaaagcaaattgtgcaataatgtatgaattgagagccacttgtattgaaaaacaaaataggacagaattttatatttaaacaagtaaaaattatttaaattttcacttgaaatttaaagcttccatgaaaattgtttctcttgcaccaataatgcacattgaactctgtgctggcattaaagatggagttctgcaaaggctccaagcacctcagcaacaccacttctcagaattatattaagccagttgggacatgatgaaagaatgcaaggtataaaccccttgagggcccatgagtcaccatctagaaaggttcttgaaaggggaagaatgttttatagtttgatcaataggaatctgagaagtaggctgcagggtaaatataagttgaggattaaaaacttttggaaacttgaagaattgaattacaatcctaagaaagttcccaggagaaaaagagagatacagaaagagagactttttcatcccatctcaaccagcagccaacctttcttctaggtcagagtacagccaaaatagatttgatgataatcagccctaattatctcagctctattgcagaactaaggcatgaacagagttttctagagatccaagtgcccaccatagtagtttcaggtggataccaaaaggaagtaaaaatggggttgcaggcttcaaaacttagagcaacttttccatagaatactccatacaaaaaggtttcttattccattttttcagccagaatgaaactttactttgaaaaatatatgtattttcagtgttgcagttgggttttcctttctctccttaccattattttagtgtcagtgaacaggctattgcattagtgtgggtatgacagtttagattgtgtttataaaggaggcagtctgtttaatggtatagtcactgtcacaagcacaaaagcataaatacaggagcctggctaagaatttctgaactcagcagattctaagagttactgatactcctttgggttttgccttattcttagaaaatttacagaatcctaccatgaaacatgattaaataaaaacagacttctaggagctgctatttatgtggcacactcagcatgatcagatcagagtgcaaacagctctatgccgtatccatgaatgcagcaggcctctccttggcagagggtgaatgtggtggccatgaggacaggaagggatagcaaggagaaaggcaaaggggaagccctactaaaggactcatgcccttggagttgcatccagcacaaagccccttttcaatttttcctatctgggttacacagagaaggctttgtgtagagcatttcttaaagcacccaatcagaaatgtgaggaaagttgcttctcttgatgagacaccagaggaaggaagcaggagacaatgacaagggaggaaataaaggagggatagctaagtaaggtagacagctaagtctagtttgttcccagtgttgtaccagtctcatcagtgccgtgtctgggtctcacagcctctggtgttctatgatggatcctctcttctgccaagagctggccacctggcagccaaaccctgcacaagatatgaagagcctgtaaatgcaggacttctgttcctggatctgctcctctgatgaagaggtgcaagtgtctccgtagctacttgaccaccgtaaataccattgtttcctcttcctgggggtcacccagagaaccctcatggaacatggtgtgacaactactgacacatggggttatcataggttttatgccatgaataatacatttaaagtatgttgtaaaagacttactttgcaaggacctaaaaacacttctatgggaagaatcagaaaaaaataattatttttgaattgaaattcaggtgcacactcatttatgaacactgaacccaaaagagctgaggtttccccaattttggagctcgtgtagaaagctttcctcaatctccttggatggaaaacttaaactgctcccactgtttagcacttcctgcagtttatgactctcagttcaggctctaactcaccagtaggggaatagggatattctggtgtatatgggtctttctgggcaaaccagtgaagcaagtctcacagctgttctgtcaagaacccaaattcccctaacctgggttctaagactgggccagccaaatggcacttttatagaacctcttcccaaaccagcgctcttgggcgatctttcttctgaaacgttatgtgtttccaatagggaggaaaagaagaaatgaagtaactttttgtccaggaatactcctttgtaaaggttgatttcagggctagcaaagatgccttcatagaaggcagttatttgtgaaagccaaggtgatggggtttgaaattgacaaagggatgaggacttagcttttcttctgaaggtgactttctgcccatggatcttccatttccattaatcagaagtattcgttaaaaaaagaaaaaaaagaaaaaaaaaagctagagagaaaagaaaaaacaaaccaacctcctgttccatgccccaggcaatcttcttgtgtaaagcaatctgtggcagctagtcaggtggcctggcaggagttttccccttcaactctggctgggagcttcttagaatctcttaaagaaacatcctgcagagctcccacttaggcctgctctttctgtcctgatgtctctctgtggcatcttttcagatgcttctttagaggatcattttggatggggaaggtataggcctgggcttatgatgatgagggatttcctgtctgtctggagaagttagaacatgtataagtgctcctgggtatggggaaaggaggcaaagatgctgcccaccagttttccaagtgccgtgtgcgcccttatccccagaacgatcctttgctcttctactatagtacgcatttgaagatctcagggcccttataaccattaggcatttgcagggcctgaaatgtaatgaaggaattgttcttcctatttctggaggtaaactaaatatgaaaagaaaattagcattaaaatcaatcctgactcagtttttttttaagttccatctttaactcaaactgtatttctgccaaaattaaaaataaaagttatagccacttaacaaaaaacaattcacacgaaatgttgtactatgtataatttgctattgttacaaatcgtcaatgcagtacctttgttagcttagtgtttttagattcttaaaacgaggcatgttgaaagaaaggttgcatttagctttctcttatgcctataaatttagtgtaagcccctgttttaaggagctttatgtggtaggactgacattgcttaataaacaatggaaaaagttaagcataacctagaagtcatttaaaactgtgagtcactttcctgacaagccaatagggtaagagaaccaaggttgcaaaataattactagcccagcctgagggaccgtggaaatatattacaggtatcagttaagaaaacaaagcagtggtgttttaccactctgcagagaaagctaaggttgctaaccaaacaaaataactttacactgacaatgccaatttttacatttctttcagaacaagggacactcaaactaccagaggtaagattaacattttaaatattttttataacctttgcatttcaagttgtttgctaacttaaccaggcttgggcttttacactgttaaatgtgccttttaaaataaatagaaataaacagaaacagagggaacaaccaagtgattgtgaacaaaatgcaaaagttaaatccaaggaatgttcactgtcactgtccgaaggtcttaggtagagaaaaaatgtgaatatttaatcaaagactgtgtatgaaatgggactgtaagtacagagggaagggtggcccttatcgccagaagttggtagatgcgtccccgtcatgaaatgttgtgtcactgcccgacatttgccgaattactgaaattccgtagaattagtgcaaattctaacgttgttcatctaagattatggttccatgtttctagtacttttccattagagcagaaagatgatgattatcacatcctattgatcaaatgaagatctagtaacatttccttttggtttaacatagagtctcctaatggcttagaagtatgtaatccatgttacctctcagaataaagttactttaaaaatccaaaaaaaagttatttaaaaaaatacagaagatgatgggatatgtaggaagtaaacagcaagttgcccatcattaaatactttcctgttgaaaatactgtcaatggtgttgtttgatgttgtttatatagagttccccaaaattataaaatttcagacagaaaagattttaatggttcccagacaatcattgccttgaccttcaaccaaaaataacagatttcttacctgactgcccctccccacaaatggccatagcaaaacatttttagaaatcatagaaaaataaaatacaaactatgtgtgattagttatatgaaccaaaagtacagtaatctgaaaatttcaaagtaacgatgaaaattatgatttgtaaattaatatctaacaattaaaacctctctttaaaagtgatattagtatgtttttaatccaacatctagtaaaaataagaaaaagtacagcaaaatataagaggtgcttgtctctactttttgcataagtacataatttgaacatataggatatcaagagtgtgatataaagaggctcatatgcacctaatcagtgcatctgttgattatattttaaaacctaaagtctagaccaaagaatgcataacaaggtgatttttttaataggccatatgagtttctttagagctaaaataaattaaccaaagagttcctttagtgtttcattgacaggtaagatttttcactagggctatcaggattcttccagcagtgccaaggatcttgcaaagcagccttctttcactttctcattgctattattatattattgagaaagaaaccttgtagagttctgaactttacctcagtgttacttaacacttatccttttagatatatatattattttttccaaggaagatggtttcattttaattaagtaatgtgaagtgggtgtgcttacagaaagaaaatatgccaataagaagtgggtaataattttcatgtgatactaaataattctcacaggcacttttatactttttaaattacatgtaagcctatgatacaaggaattaattttcacattgatttttaaaaatatataacatcagttttttagtgacttgtttcactcttcaatataagtataatttttatttactgtgtgactgtactaaaaatctctgttttgtgtggatggaggattatagtaagctctgaggctagtcaatccatttggaaacttgagtttgttttaagggagaaatacagcaaactaatattaagaagcagctctcaccctataccaggtgtgttcactctccaaggcagatgattgtatgctgctcaggaatcttctcataagtaaatagtgaaacacttttgtaatttgtaagctctgtgatttttattttttctcctctcttgaagaccttctttctctccatgtaccagtttataggcctcctctgcttccctttcaatagttatgattgtgaattttttttaaattttgcactttatttgcgaggtaggtcagttttcactagccacagaatccgtggggcgtccataaccatacctgggctgtacatctcacatcccattctggagtggaccttcggaaagttcctctggctccaagaagcaagtttatcattgcatacatatttagctactttaaatccctttttttttagagggaaagaaagataaggcaatggtaatgaggcaagaaataactgccaagtgcttatagaattgagtttggttcctgccccccctccccccccacccccccaaccagcccaccattgttaggtagatcaaaggagactgagaaggtcctggagactgattctcatggtggtgtgaagctgtaactgagagctccaggggtggctactagatgtgtcctctcctcctttccgttctcttcctgctggggacaagggcctgtccagctccgtcctagacttttgagaatatagattggggaggggagtatacgcatagagatgacagaatgacaaatgaaatttgcactttaaaattgttcaaaatatgatctgctgaacatctccaggtttttcaatataaaatactttttaggttcttttaaagtataaaaaaatcttagcctctccaaatgcagttggtttaggggcgtgaaaattcctccgatgttattttttaaatacaccagttcatagtttattccactgcacacccttcctgtagaaaggtttctgttttcagagtgactgactttcagtggattttcaggaggaagaacctaaagtataagtagtaaggcaccaaaagagtagaagaattactttgtgtgaatttaaacatttaaaataacaaaaagctaataatctatcacttaataatccttaccatgtggctgtaactgttccaagcatttaaggtaaattaactcatttaattctcactgcaaaacctatgaagtcagtgctagtattatctccattttatagaggaacaaacaggcacagagatataaatttaactgtttgtgttcaaactgaatttgaacttagggagtattattctagaatccattctcttaatacttgcaatgtgtagcctattttaattctaaattcaaggtgtaagaacacagagttgctcttgaagtcagggtccccttttcacattttaagtttatagttcctacatgggactaatttaggcattctaggaatcaaaccaaagagttaaattcatttttttttgccttcctagtactttgatagtagcaggtataaaatcagtagaaagacagcttctattgtgcattaagaagatgatgggatatgtagcaagtaaatagcaagttgcccatcattaaataatttcctgttgaaaatactgtcaattgtgttgttcgatgttgtttatatagagttcctctaaattataaaatttcagacagaaaagattttttctttaaattagtgttctttcatattatcagacatgagtctgtaactcattatgcttccaatttttgtgccttggctaccaacaaatctagagcaaaattttcctttcattcacaatgactcttgttacagcttttctagtgcagctatccatcttgctcaacatagcttcaatgctgattttaatgatcctagcagtcttttacaaatccatgttgaaagtagttggagtaaaaaccaaaattacattttaaaaatttctccaatttgctttcacctgagaaccctgcaagtctgctggatatgactttgaggcccttaggaaggctggaaaaaaacctcatttcatccatttaacttgtgaatgaaaacaacagaaagaaccctgagagaaatccatggctaatgtgtgcttagcacagccaagtgtgctctgaatgaaaccaagtcttcacacacagatacaaaccccaacacataaaaagaaaattgcttttgtgaaaatctagattgtatgatagtcatagactcagcatttcatccagttgcataataaagaagtgaaatcaagcccttcttaattagtgagattactgtagttaggtgggaatgagtttaatgctttagaaataaaatatgtagccatgcattttcatagatttaaaatctcttgttttgtgtttcatctgtaatttttgtaatgcaaagttgttttcttacagattcattttctataataagaattcatttttatgattcacaagctgcatgtctgttttgttttttaaagtgttcagatacaactggtctataattaaaacactattctcatttaagtgttggctaaaatcagagcttcagatctttgttttgaggttgtataccttcttcagtctggtctgtgaggtcccataaatagctgagttagagttttatgagatcagtttaaggctgttgttgctcatatgtcttggctgggaacatattctaaccaagatggctgctgggctttgttctctccatcgtcactatgacttaacaaattgagtcccaatatttggagttggcaaccaaaaagattttttttcttactgttataaggtaccaacaacttatcaagtgtaatgatatacacgtggaagacttactagaaaaacaaataaaacaaactttaaaaccatattctgatcaaatttagtcatactttgacttggaaaatgtgcaacattcatttgctttccaaagtgccagtagtaatacaatttaatagtgcaaaattaccaacacatatttgttttgctttgttttactttactgcacagaaacggaccaatggactgcgaagaactcctaaacaggtggatccaggtgtgtttctgattaaaccttccataattatggcttcagctaagtgcttatgaaaggatatgggaattgctgtggaaagtgaggcatattgttggcctttgttcctcataatttggtgtataatgtgtgaccaggaggtcatggtctaacgtgtaaatcattcacatgagtaactaccagcaactaccagcattgcactctttccacagtcagcagttgagctggttatttgcttactgaacagcctcagggtgcctggttaatgctcacatatccagcaccctccctgtgttcctttgtaaatctagtaagaaaaccagccagctagctgccacttaaaaatcactgttttctaagtaagtaggggagagcataaaccagacaactggtacccaccctccatcagagaaaatttcttaattctatatccatgctattttataatagcagcatgttttttggggactttgtgacaagtttcctctccggagaccaattatttgtctgcagaaaacgttcagttgttttctatttagcattgtgagatttgccctgtcattatgttagtataattatttttcatccattatgcaatgccttctttccacagtttaattaccaaagattttttatgtatgtgatccttttgttgtgagtaaaaggtattcacagttaaaggattccaaatacacgaacttgatgataaaccaaggggaacatgagaaatagagtagctttgctggaaaataatctggactatgtgtttcattttgttttcctatcataagtggtattcacctagttgtaaagtttagttttcaaagcattatagtttataactgaaaccacacccatggtagcattgccagtttatgagctgtttaagatttataggagctttgttgcctctggctagaaattgcctcacttgtgtcctgagactagtttaaatcttttaactacagaacaaatttgaagccattaaaaaaacaggggttctggtttactttttaatagttctgactttcccaagacaatatcctttgcagaggactccctgcaataatatttagaagtgactttctctattattttcagtaggggtatatgactgtgaacataatatttttgtcttattttgtgtgagttatagtattgctgtttcagaaaaattacttaacctttataagtgttatttttttaatgtattttttctttcttctcccctcagggaaatgcatttttgtatttgtagtatgtcaataggaacatatttgactcaaccatttatagccaaaattttctagaatcccttacattatttagattagtaaattcccagattagaaatatggcaaagtagaacaacaataaaacagatttatactcctttatcctaaaggtgatggctttgtataggtacagtttttttgttttgtttttctatttgtccaaagactttagaacttcatgaagaataaacttacaagagaagtgctgttgtatttatgtttgtaagaacatacgtggctgggtgcagtggctcacgcctgtaatcccagcactttgggaggtcaaggccggcggatcacgaggtcaggagatggagaccatcctggctaacacggtgaaaccccatctctactaaaaatacaagcaaaaaaaaaatagctgggggtggtggcgggtgcctgtagtcccagctacttgggaggctgaggcaggagaatggcgtgagcccgggaggcagaacttgcagtgagccgagatcgcgccactgcactccagcctggtgacaaagcgagactctgtctcaaaaaaaaaaaaaaaaaagttttccattacgtataataaatgtatatgagtgtatttttcctttttccatatttttggaaataaaaaacccaaacacttgatgatcttgcctgttgaagctgctgatatagtaagcctatttcttcccacagctgtcttttgatttaggcttgacttatgtatttaaagttgcttgacttttggatttctgcctctttctgctggttagttgcaaagcttctttgttcaaagttaacccttgcttgatgaccagcgtgccttgatcctcatgtggctattgtttagagattttcagacaaaatgtttaaacaagggatcagtaaagttgagtctgcgtagacaaactgcttccacaatgcattatttgctgttagtatttctaccatggaagttcctttgatttttttttatcctacagttaatttacttaacatctccaagtgtcaacacatgactttgcagggcctcacttaaagtggcttataaaagcaactgattaaagagtttaggaggccgggtgtaactacttcaccaggtccaaatttcagagccatgttcaaaggtatattatatatattctctatagcccttttgcactggaaaggaacttaatgcatagtccagtgggtagtaggtgcttaataaatgctacatgaattaataagtgatgatacagtttttatgtatgcattgacattctttctttttaaattcctcctgctgatatgctaatgaaacacagcatagtctagtggtgggaagcatggctctgagccatgttgcctgggcttgggactggccttagctgtttacttgctgtttgaacttcggcagtttgcctcctctctctgtgccatagtttcctcatttgtaaaaggaaatgaataagaggacctaccttacgttgttgttgtgagcattacgtgagctaatatatgtaggccaggcgcgttggctcattcctgtaatcctagaactttgggaggccaagtgggaggatcacttgaagccaggagcttgggactgtggtgagctgtgatggcaccactacattccagcctgggtgacagagcaagaccttatctcaagaaacaaaagagcaagtaaagtactctcaaaggtgcccaagtaaagtactctcaaaggtgcccagtatatagtaaatgctaagtatagcaattactatatcaactaatttatattagagcatgttctttaatattggactttttgtcatgtgaaggagaataatattaaatagaccctgaattttatgttgaatttctgttgaaataagaagctacataatcacagtcattttcagatttgttgttattcccccttaatctaatggctttcatgatcttttgcttatctttaccaataaacatagtcaactgtgatagttgagaggttttttttttggtgaaattattagtgtttgttattgcaataaagaagcaaagaaaaactcccaatattgaaaacatatattgtggggtttattcaaatccaagaaagagtgaactgtaggtttgtgttgtagcttgttagcacatttaaatcattcactccctattaataattgtgattaatctttatagacaatatttgcaaatggctttgctctttattttttcttgtcttctattgtgtgctaataaaagtatcaacttataatcttggctgcttttataaatatagtaatgtattagatgcaaattctggtagctcttttgaatttcttaaatatagcagggaattttcatcagtttgtacttttcttcctaagacagatgttggtatcaggaaaataacacttgtaacagacatatcaattatttcaggaacacggaggtgctaggcctttttcaagaacatgagatcataaatctcaagaaaatctgagcactgatgtaatatttttcacctaaagtggcactcaaggtcaaagttaccaattaaattttaatactgagctttaaaaatttccttctgtctcagtgtaggagatacaagatttatttcagtttgcatgtggcaaatctgtataccagggcatgtattcttttcactgggtccatgtttttagattattgcaaaattgtcttatatttgtggaactcatagcatcctgcatttaagcctacagtcactagcttttaaacacttcaggcgaccattctgtgttgtgctgcctaaagattatgtggagtagatgggaaatgtttaaatagcttacactctttctgatcttaagttattcttgtgctttgtgataaccttgaataataaatgaataggtaatgattaaattgataagagtcctttctgacaactcttgtttctcagatgctcattgttagactcttgattacaaagagttgcatgtggcttagaaaaactgtcttttcttattcaccaaggagatgtcttactgttttgtagcagagacatcttcaaagatggtcacttcctctttcaggtggataggattgacatataacgccattctcatttgttattgtatgaagaaaggaatctaagaaatctttctttcattaccaatttcatttcttatctgacattaagcacaggattgtcattaattataaaacatggcccctttccgcaaagaatttatattcttcctaggaaaggaatagatatagacacaaagttctgattgcataaatgcatgtatataaatgtacatataaaatttttaaatattatatactatttttgtgcagatttattacgtatagcagtgtcttaaaaacaattagtgaattgtttaataaacatataaaaagatctaggattacacaatacatacaagaaagcaaaacaaattgggaaacacaaatgtctcaaattgcttttaagctgggttacatataaatgttttcatttatataaataaaaatttttatactggtttattgtattgaattacaatttaatactattgttcttagtgttttaatttcaaaggattgtgaaatttattccaagtctaaacagaattgttgatttcttttagatttgcttttaaatgtaatgtcaatatgttcaatagagaaattttatatttttgtttccaaatagaaaacattgagaaaaataacaacagagtgttttcaaatgcacttatctaaaaatacattttatctcttttcttttttatgagggagacaaatgcatattcctgaaggttttagtaaatgagcttttgtctataataaatagtaaagtttctatagattagaatatttccatattaatcagtcaaacctgcttctgtcttttctatcacctctaaagctaatttctcatcaaatataaatcttaatctaaatattgggagcataattgtaaatgtgtaaaaatatatttcacattgaaagaaatgaacttgaaaaaactgggacagtaaacccagtgattaagattcattgcagagaaatgagaaatccaagctgtgaacaaatgctgaggagcatgctctggtttttaaaatagccgactttttttcaagcttctatgaaaccatggacaataagactagttttgcactaggacagttgatcttcttgtagtcattttcaggactacctttctgattcccttttccgtgataacagatttctgaaatgagcaccacagcctcttgctcgcatctttcttggttggaggaggatttatttctccccttcaaggctcattccgagttcacaaaggatcactacttctgttgtctggcaggtctgtgcatgccttgccaagcctgtcttttatactggtcaggcaccttcagaatcagaacaaaggtgaggtgaatatctggagatgtgcatgggggtgcttttagatggaaaatatacatcagtaatatgactactgaaataacagaatgtttgaattatatttagaacctactctgggccatttatgcacttctaacaatttctattattgtagtagttatgttttagaagataaagtatatatctattaaatatttagaagaaaatcctgaaaaagaagtaatgaacctagtgagctacttcgaacatttatcatcaataaactgttccttacttagaacgtcagatatggagtggacttcctttgccatatctatggttatgctggttgaataccattccatttcagaaaaagaaggatatgccattgtaatgctaagtagataaagaaaagtcagtaatttcttatgggccagcaacctctgagaggcagatgattttctttcagcacttaggtctgaagtaacttaaatgaaaggaactaactgggtcaaaacatattgactttgtataacaatatttgatgcaaatgatatccaattgatttcaggagaggacattgataaagtaattcttaatataatttatgatcttatttatactacagttctatgtagaaatagcaagattattatcaaattaattagaaccctggagtgctatttgtggaatttctgtcaaaatgactcatattggcaattagttatctttcagcatattcaaatcaagttgacttctaaatttttaatttgaatgaaaataaaagcttatgtttggttcttataattgtttttatggatcgtttttcctttgaggctcattcattttcttctatataggtattagaaacgtggaagttcctctgcctttgaggaacttggaattttgctggagagttaagacatacaaacataacttgtcaaagtaatattgtagagtacatgatgaactaccaaagtgtgtcgtataggttatgaatgatctggttgactgtgaaggcagatgagggagaattttttgcaaactgaaggacacaggacaaggaaacaaaatatctaaaacagacatcagtaaaggtaaatttactagaactacatatgtttaaatgaagttatcagtctgttcctaggtttgggtcagttcaattatataccaaccaatatgcttttgattaccaagtgacaaaaatccatttcaaactagcttaggaaaaaaaaaagttttctgacttaggtaactggaattccaaagcattttggcttcaggcagagatggatccagggactccaactgatatcattagggttcagtttctctttgtgtcttagttctcctttctcctctattggcttcttgtcaacatgcacctcacagaggtttttctcatgtggaggcaaagttgtctgttagcagctcttcatgtacattgtccccacagctggttaattcagagaaaatagaacatctttctctcagtaaatccagcagaatcccaaggagagctttaattggcctagcctagaccatgtgctcttctctgaagcaatcactgcagccagagtgctctgttgattggccagcctggcttctgtgctcacttctcaggtgggaagtgggattgaactagcttgtccacatggaattttttttctataattctgtttacaaatgaataagagagaggaaagagaggcttggttttagcagattaaaatgtacatctattattgtgtgcaacaagtttcagacagttttcatccttgggcatactgtgcctaggttttccacctctcctaccttgtcctttttccatttgtaggatcctctgtttgatagttctctggtatccaaaatggttgatgtggagaagtgaacctaaaataggaactggagattcccaacaaaggtttattccaactggaagctttttgtttgcagtggtaaaagaaaacactaattttcttgccacatatttgatcttcttgtagccctgtcatggtacctcactgtttttagacagtgatcatccttttttctactgttatctactgacatgttagcatagattggtttatcggattagagaactgaggaaacagaacctaacacagcatgttttgtggggacagaattgaagaaaggtgccatccttaaaggaaaggtcagggtaagaatgtgggagagccagatgatacagctcttaaggcattaaatttaagccactacctgcttcacggcaataaaggagtaatgaggaaagaaagagaaggagagatctttttaaattttatctgtattaaacatattcatgcataatagcacttttaatctccaacggtagccctgtgtggtggtatagactgagggttctacagtggcacagatctggatttgtgtcctgcctctctactaactagctatatagtcttaggcaaataaacctgcttatcatctctaaaatggaagtaatagtagcagccatctcctagtattattatgaagattaaatgagataatgaagtatcaaccaagtttagcacatactaagtgctctgaagattatgatgatagtggtggttattgatacatatagatacctgtattttctattgctatgtaacaatttaccatgaatttagcagcttaaaacgacacacatgtgttatctcagtttctgtgaatcagaaatctaggcatggcttagttgggttctgtgcttcagggtttcttacaatacttcacttaagatatcggccagggctggatctcatccgaaggctcaactggtgatgggttcactttcaaactcacttacactgcttttcgcgggattccattccttttggactgtgaactgagggccttatgacctggaacacttggccagaagctgtcttcagttctttactacatggacctactcaccatggatgcttgcttcatcagaatatgcaaaccaagaaggtgatagggtttccttgcaaggtggacattaaaatgtataatataatcacagaagtgacatcccatcacctttgccatattcttttggctacccacattcagggaaggggattaagtatgtcagtaccaggaggcaaggatcattggggtttttcagcagagggaaccaaagttctgagaggttaagtacttcaaccaaggtcacacagcacttggtgggtgccaaacttaattgcagcatatttggctttagagaccttatccttcgacatcttctgtatattttacttatgtcaagctttggacagagaaaagcttatttcctgtggtctagctgtatagttctgtgcaaattagcagtgggatctggtctgattttcagagttcattagtggctgctgttaccaagcagatttatgggtgattttattttatgcattgttaattttgaaaatgttaatctgaaattgctacagtatttcaattaatttgggtgattaaaacttagcaccagaagaatccctaccagaagataaggcagctaattagaggttctgaaacaaacaactgtagacactggcactgaaacacgccatgtgtatgacacccagcagaactcactctgcttaacagtttggaaatggaaagaataatttctgccagtctaaatattaaacttgaatgcagttgaattttttaaaagctattttaaggagttaactatttgaatcaatatatagtttttaaatatcatgcagttctgaaaaactaccttcagattattttgcagtgttggcttttggataactgcagtagtgacagaaatacaatagatatttgttgtccaagtattatttaaaaatgaggcagcatacactttttaaaaaatgacacttgagcttcttttgctagagttttgcattttgtaaagtttatcttaaaatattcggaaaatataaggaagtgtagaaaaagttctctggacaaattacctataatcctctcactcagctaatcaccctgtatacttttgttacacacttttttcctcatatgtttattttttatgtgcagccacatgtttattaaatgcctatgtttccagtttggtattctccttttatcacttaattttgtttcattgagcgaatttgttgattcatttgttctttcaactctttgacaagtatactgacttggtgttaagtgtacaagaatgaacaagatgtgttttccctcacacaactccctatgtcctggagcaaaggtaatggtgaagatttgagatcagggagatacagagggtatacttaaaagaggcatagactttagatatgtgagcatcaggaaatgatgtctaacctggaatccaggatatgagcagggatcaacagcatctaaatggagagaagagggttgcaggcagagggaacagctccaagaaaggccctgagttggagaaggcacaggatggttagggttggagcaggagagccattcacaaagagaatggaaggaaaaccaaggcaggatcttggttgatgcacatcaaggaattggactttattctgatgaacagattgagcctttggaaaggttttatccagaggagtgacatgggcagctaggactggttgaaaagatcaccctagccgcacttgaatcttgagtcattaaatactcttcagaaaaaaggaagtgggttttagtataatttattgttgaacattagtctttctaatttttatttttataaatgctttgaggaacatctgtgcatgaacatacttttccatatggctgattattatttaacaatggcgtcatagaggtacaatatctgggtcaaagcatatgaactcctagattttggatgtagatgttgccaaatttaccttttagaaatgttacattgaattatgtccccacatattattggggtatgagaatatgtcttattttatgcccaccaaccttgtattgttcttttcactataagtcattagataggaaaataatagtatcttactatcatatcatagtagttgataccataatatgaacttccttgatttttagtgagatagattattttaatgtttttggctatgtgtatttttttctgagaattatctattatgcttactccctctttctattcaagatttggtgcttttctaaattacttgtaagaatatatgtgtgtgtgtgagagagatcaatcttacatttatcgaaaatatttttatattttttttctggtgtatttgtttctatataaagttttaaatttaccaggagtcaaagttacagacattttatttatgatctgttttactgcttttatgcttagaaaattttccctcctctgacttattaaacacctacttataattttattgtttaatttttgtagcatttggccatttaacttatttttaagtaataacttatttaacttatttttatttaaggaatagattttaattctgtgactaattccaaatgtacattaaaatgtttttcaggatttacattacaagattttacagaatttaaatttatctttttttttttttttttttttttgagacagagtcttgctctgttgcccaggctggagtgcagtggcaagatcttggctccctgcaacctctgcctcccaggttcaaccgattcttgtacctcagccacccaagtagctgagattgcaggtgtgtgccaccatgcctagctaagtttttgtatttttagtagaggcagtgtttcaccatgttgaccaggctggtctcaaactcttggcctcatgtaatcctcccgccttggccttgcggcgtgctgggattacaggtgtgagccactgcacccagtctaaatttatcttttttgttattgcataacaaccacaattatattgtgtactttttgttttgtgctttattatacacatagcttgctaaaattgtaagttatcttgtgcaaagcatgtcacaatacatgttctgtatatataggaaattacgttttaaacaaatataaatacttaatattgaaatagtcagttttgttttgttttttttggtaaaatatgacaaactaagcctaacttccccaaggattttcagaagtaggaagaaaaatattctatggctctgccttttgagttcagagtagctcctcccgttgttcttatttccttttgtacatatgtgtctccctttattttacaaatcctcctcatcttaatttactctgctgctcctgggagtgagactagacctattattttaaaagagctttagttttagtaattcttcatctaagtatgaaaatttcaacttctactttatttgaagtatgcagtagatatgttctcatttcaaaaacagtgtggagattctacactttcaagttctaatttggcaagtcttatatgtcatcatgaaaatattaggtgtttaataaatagactttcttggagaagtcggttgtaagcaggtagaataatgactttggattcctgcctggcatgttgccccttatgatctgttcacagaacgtgcttctggatgtccagatattaaccgttgtgatcatagctacctcttatatcaaatgccccaacaaaatcgtgtgatgtcttcagttcaggacagagctttccttcttgggagtaagaattactctttcagtttgtctagaggacgtgaacatgattagataaacaaaacatgaaagtgtacatatatttctctacctccacctaccattataggcctaacattatagcttttcactcccagaggaagaaactttgccatttcaaaaaactgtaatgccatgctttggggatcccagatttaaatattttatgcatcttccatttaaattcaagcagtatccaagaacagaatctggccaatgattttgagaaaacgaaatggcaacaccttcttggaacctcaaactgttcaaggatttttttttctagcaaaacaggaagaaattgggggaaaagcatatggactcaggttgagcatatgatgtattttcaactcgagtcggcactttactcatatttgtagtgtgacttaaaattaatttgggtgaagcactcagatttgagggaggaaaaaaaatccctatttgggactaagtcaacatttgtggcatctcattaatcgctgccttatgtaactgctttccccacctaaagagaagctactgggatgagaaaagtttataatattaatgccaagtacagatcttgcctctcccaaaaggagttcattaatcaccatcgaagcacaagaacaaacatacttcatgtctcttgccagtttttttcaataacatttctgaaaggcaaaaaaaaaaatatgtttaatcttcatttgcaaaggttttaatttggctgttatttaatttgtgataatgttatgtaaatttaacatgctctgagaatgcccaggcatagggtatagaagtagagtgtgttggttaagagtttgggcccatggatcagagagatctggatccagattcttggctttgttacctcctctctgtgtggtcataacacaggcaaagcacttcaagctcagtgcttgcttggcacgaaatagctggcaaagagccagcagtgatggaaattcttactcttactggtaggaagcagtatgggcatcaagtttgaaaacatgactttcagtccaagctgctgtgcaaatctttggacaatttaataagcctcagttttctaatctgtaaaatggagatgaaaatactcaccctacccacatacactggcacaaatgatataatgtattaatcaagatagaaaactgaacctagccatggcatacaaaatcatgtcatataattttgaaaagtgcaaagttgtgaaatcatctttattttgccatgtatctcagattctcaactgtaacattatttgggtgatcagtgtgtagtattgattatattttagtgtcagccatgtagttactctctcctctaaggagttttttattaccattcactggaaaatacacagctttttctttgcaattatttctttacctcttttcttctgccttccaatttaaaattcatgagtaatacagcacctcacgaatagatgaaagggatgacaatctaaaaaaaaagaaaaaactaatgtaaacctcatgctggaaaacagaaacaccaatttaaacaatcataaataggaaaaacaaaaaaacctgttgtgcaagaaaaggaggctctagtctacctttatttacaaccatcagctaccgagtatcaaagataggaatggatccatggtgaaattttcaggcattcttgaaaatgtgtttatttctttcttgtctttattagatgtgccctgtctccttcatttctttatttccatggcccctgctactagaagcattgtaaaaagccaaaagaagaacaagaaattctgaggacatgggtgaaaatgcagccttgaggtttctgaaaataacaggagacagacaaggctggtgtccagcaacaatactgggtagctctttttgtccccacttacacagcgaaggataaagaagagatcctatggacacttagtaaggattacttcatgttttaattcaaagtactttggaaagaagactttgagcagagtggaatagcaggaggtttttgtaaggtgaaatagaatgaaagtgcagccaagaatttttctgtcttcaattttaaagaacaccggcataactcatttttctttttttcccctgtgttctttttgaccttcttagcagctcctgactttctcccttggggatttttctctgtatagtcagcgctgactcccttagaaatcctgaaccccacacccgtatcgcgaaagagttgaagagaattcaaataaacacgttgagataagtagcttgtgaactaactgttacagcatgcctctgtaataagatactgccagctagaagctaaaataaagtgaaattccatttaacatgtgacaatcaaaactgtatgtttctcctaaaaatataagctaaagttaatgttagacattagaaattcatactgaaacacctacattcatttaatggtaaatttctttagaattgttagtttcctcctctctagactgtccaaacatagttcctgggaccacgcctgtagtttctttctctcactacaatgaggaaaaagttgatggtttgctaatctcttattctacacatttcattgtactccatgactgcaaattcatctttgtatgatttatatgtcaatcagcatgttggtgaagtagccatggaatgaatgttagagtgatatttgttgatgtactagaggttttacatgctttatttttaatttcacaacaaagctgtgagaggtattatgcccattttacagatgaggaagctacactgagagttgtgacaggtgtccaaattcatgtaagtaataaacgctgaaactgagctttaaaccaaatccttataaaacttccatatatgtgtttccataactagaagaagcattgtatgtttttaactaatttagcagtcttgtaggaatgcattcattaaatcagtgcactttatcagaagatttattttttagccaggctggctacaattatggatcatgccagatgctcaatggagggaggaagtgagatgaagtaggctaaagagaaataatcttggtcagattgaagaaggataagcactcttaattgtcaatatcaaatgaaaggagaaatatgaccttgatgtgaaggcttaaggcagggttgctatcatatgactgtctgggtcctggatgagagaggaccagctgaggtgattggagagcctgggaaagagcttctcggaagggcccagttgggcaaagggcaagcagacactgcagatggcccctcaagtctctgccaaccttgggatgctacgattccaagcaaggaaggaagctcattccacatagagttttagatctttcattagtgtgcctttgattttaacgtgattagaaaataaaatcatagcaaaatatcaggaaatgaccccaaactaatgtaataaatgctgcttctgtttgttttttatactgtcttttcccttaatgtcttcattaagatttgtgtagaaaacagggttttaagcaggatgttgctattttaaataatttatagaggatgattgtttttctgtgttgtgatttgtttgtgtgtgtgtgtgtataataatcctaacataaaccatcatcagcgaaaccatcactaatgatagcaataaaccttatcataaattcatttacattattttgtgtaaaaattgcatctcatttcctaggcacatatggagacattgttggattatatttcctgcattgctaccccattacaggcatgctcttacatgcatgtgtgggtggccagacaatataagtggttaaaaaattagttttgtagttagcattgcacagctcagtgctttttctcactacttagcagtgtaccctagtccatcctttgttactgggggtgttattagcatccaccttccagaatttctgtgtattgattaactgagagactatattgtggaacattagcacagtgtctggctctttgtccatactaataaatggtagatattagcatcacctgatttttgccaccatctatacattcctggagcagaggtatagaaggtgagctaaaacctatagaggcagcttctggataccagactctcgaggccatagccatgctgttgtcttgttttgattttaagtgtccagatccattagagcagaggcagcagtacaagctgctggctcttacatgtttggcttatgatgcctttttgaaaatcaatgatacagaaactccagagctaggctgcctaggtttgaatgcagtcttcactatttaccagctctgtgaccttgctcaagtcacttaaaccctctgtaccttaacttctttaaaatggaaataataagacccacttcatagggttgtcatgaggcttaaacgagttaatatatactaaggtcatagaacagggactggcacataatttatatatatacaaattagctgggtgtggtggtgtgcacctgtagtcccagccactcaggacgctgaggcaggtgaattgcttgaacccaggaggcagaggttgcagtgagctgagatcgtgccactgcattccagcctggtggcagagtgagactccgtctcaaaaaaaaaaaaaaaagtctcaaatgatcttgccatagaagtatgaaagggagtgagggatcagaagccacggtgatcttctgtgctgcttctggaaatagtggctcctggtccagacatcacagatttcacctacctgccatagttaatggccatcacagtcctgaaagcccacacaccaatttccaaattgcagatatcaccttgcttcaggtcactctggcattctccaagaactatatttttgagaaataagacattaactcttatatttttttcccttaagagtaagaacattgttcgttattcatgagtgccagtagccagttctgtgactttggtagctcatttaacttttctggacattattttactcttgacaattggtgggttggatttcatgatttcaaatacctgttcacatcttagtatcctaatattctttctacagtgaagaggaagggtaaggtgaagggctaaaggaagataatgtgtgtggtgaaaatactggcataaaaacctctattcttcaggccacgtggtgttacttatgaacatagtgaccttgggagcattttctgaaaatactcttccccctccctgttttgattctggaatagtttcctttttcctcacaattctaccttccttcaacagttgcatttacagataatatccttcaccgtttgtttctttatgcatcactagtgtgtgtataaagcagagatggcaagagctgccatgcattttggctgtgtgattttgcaaccaggagacgacctagtaggtatgcagcaatactgacatggagagatccctcctccctctggatcaggctgggacagagtgtttctagtattggcctgcaagacactggctctgccctcagcagggatggctgtgtgcagtcaggtatgtaaaactagttagctcccacccttgaccttgtcatatgaccgatcatatgaaagtgtatttgtgagctataattattgaggtatctgccttatctcccttgctagactgatagctcctttgaggacaaacacctggtctttatctttacatttcctagggagatttagtgcagaacccttcacacaaaagtgtttagcagtgctgtaccaaggagggtggatacaatgggagtagtctacctactagtggggaaggatattttatcactgacattgctgagaattgctggcccatgtgataagaaaaaccaaaccagctttgattaaaagacagttttattattgtttttaaattatccccagacaatgcaccccttgttgtccagcctgacatgaaccactctcaacccccatattttcccacaatctaacccttcttctacaccactggtatttagtaaattattattcaatttgtcagctgttgtaatagtctcccaattgttcgtcttgcctccaatcctgacttcttttattgactcctccagactatcagaagaatgatttacctaaaggagagacagcatggcctctcctacttaaactcttcagcgcatactcagaaccagtctacagtatattaactataaaaggcccccaggagctgattcatacctaacttatttctactactcctgcaatagcagagatctggtaattttccacatgtactgaattctttcttgccactataccttgggtcatgctcttgtttctgaacaaaatgacttgacttctctatttactctacttctatatctggttaattcctatttatctatcattcatccatctaaacttaattccagtattccctcttccaagaatcctactttataatactccatatctggtgtgcattgtgggtccctctcccatgacaacattgctatagtattttttttaatggtctgggtgcacatctactttctgcaatctttcataagctccttaataactggagcttcatcttttcatatttatacccatggtatctggaacatagcaggtgatcaggaaatatatattgaactgaattggaagcgcaactttataaaagggaacactggtttgtggtgtgaaaattctttaacctttttgaaaagccgacctatgctgctgcttcttatactttgaaaattaagaaaatggtttgttcaagcactgtagttctcacttataagtaggaactgaacgatgagaacatgtggacacatggcagtggcgaggaacaacacacactggggccttttgtggggggttggggagggagagcatcaggaataataggtaatggaagctgagcttaatacccaggtgatggtttgatctgtgcagcaaaccaccatggcagatgtttacttatgtaacaaacctgcacatcttgcacgtttactctggaacttaaaagttgaagaaaaataaaataggaggggagggcaaagagtgattgtacaaaacaaggtgaaaaatttagaaaacattatgtaatagctaatgtatgcttattaaaccattaagaaagagaagaaaaaaagaaaatggtttgttaatgagccagcagtcctattttactaattgcttatttttgagactaatgtacaaaaataatgaaaagcattacatttgagtattggtgagcccatactatctttgttaatttttttcatatcataagaacaattaataaaagatttcaaacccacagcatcatagaacacagacatgtcttataaagtgatattttgataaattttgcaagaatcttcaagtgaaaatcatttgtctctaatatcaaccacttagagccaaattagaacaataggagtttcatttaagatccataagtagctgcagtagagtattactatgacactatttgctgaaattataaaggggaatttgctggtaccgaaagtcaaggcaatcagatttttcagcggaggtaaaatactaccaaatgcttcattttgcaaattggcatttttttctttgaagctctgaccactttataggcaattatcttgaatcatgtggcatgtaagtctgcttattacattcttctagctataatatgtttggtgaaagagcttatcaaaccatttttttttcattatattcattttcgatccaaagttaccaaggattcaaaaatctagagaaagtttatgggggttacagaagacccagagatattttcaaagcctttccaatagaatactatgcatatttatttttttaagagtaatatttggaccagaaatacttggtttaggacagacatttctcatctttctttcattataaagttattttaatgacccagatttacacaagcctgtaaaacagtgtagaagtctgtatcttagaattccatttgaatatctgcaaagggaaagtatatttttaagttactgaatacactttgcattaggtaattatcaccctcagatgtttccaattaatcctgactaaccagatgaactagagtaacacaatattccagtcttaaatacgttttttggtttatacaagaatgtggatttaccgcatatattcttaaaacataaattcttcaacatatttaaaatatgcttagacttgtaaagaactgtaattgaaaacccagggaagcttcaggaggacaagaccagcctggagcagcccgagaagtcgatgtgcaggtcattgctgtggatagtgagggtttcagtgttggggaatttctgctttctgattgacacctgccccattgtgaaagtgctttcaactgctggagttggataaggttaccaacttttagcttcattgctttgccccttattcatatgactaatatgtctttttctacccattaggcccacagaaagtgtgctttcgttagcgtttttctgggaagtatggtacctcgcagagctttcatttggttagtaaatgttcttgctaaaacgtcagcacataacctgtcaatctggttgcatttgggctataagaagctttaagaccagtggccttgaataaaatccattcaactcttagtgcttttaatgaaatagaaaagataactattgggcctctaaaaacattgatcattgaaaaacagcagcatttgtgctctggaaatgcactgtgtgtgtgtgtgagagagataacttatatccctgtgacattattgtctccacttgaggcagatatttttttttcccttatagaaatcctttcaggaaaaaatccaaactgagcagagtaaaaattgagacagtattcttttgtgcatgttttttgagcttccctaatgttttaactttatagtttttttataaaaacaatttgtcatattttaaaatgcaattttaatcactcggaggaaggggactaggtacatttgtattcatgtcgtgtggggatataagtttgttgacagtctcattttgcaaaatggatttaatgctgaaaaaatcatagcaattcattttttaaaaataacacagcctctttaaatacagtgctctagttttcaaattttaggtctatgccatgtaaacaattattcacattatgaattaaaattctgtttgcttacagagcagcttaattcttttgcttataggcacatagtgacttgaaaatctaagtaataattgttcatttaggagaggaaaataccttcctcaactaatctgtaataccaacttaattttccgtggtaggtagggaaattcggtatcaccaagtcctgtaacatgttagatatacaacagaaccacagttgtaatgatgttgttctaaggacttacagtctaaagccattccttatttgaaatagagaatttgacaacacatatacacgcagaatggccccatattgtcatatttgtacaagcaaaattagtcaagaaatgcagaaaaattttgttaaaattattttaaaatatattctttaatgataaacatgcacatatgctttcatttatttaacaaacttttattgagagattattggacaccaaacactatactttggataaacaattgaacaatttcatggtccctggccttgtaaagcttatattcaagtggggagaaagcaaaacaaaattaatatacaagttatgttaaataactataataaaaattcagaaacacagttgaacaaaggaatgttcagtgtatctgcctgggagggttgcgaagacattgcagaggcggtgcccttgagggattagaatgatccgaaagcatagccttgcactgtggaagtgagtggtttacttcgcggaggatggtagcaagcactttgggtgcataatgggtcgtgcaagagtggcacctcttgtgtgtacatgtcacagagctgccccgtgaaggaggctggtggggactgagctccagctagcagatcctggcatgggaaagtgtctaccctggggcagaaacttttgttaaataatattataaagttaactacataaagtttagaaaatccatataaggaaaaaagttctcataattttacacatcagatgaaacattgttaatattgtggcctatgtctttatggattttttttctgtacttctttatgtgtgtgtgtatatagatatatttaaaaacaaaaatgaggtcatcttgtatacactgctgcttgtaacttgattttttccctcaaccatatgtttgaacattgtgccttccctgaacacttgatgagattatgtccttttggtttgtgcttccgtagcgtttgcaatttttctaatgtaaaacacataatgctttgtaatatttgcctgtataattttccttttccctgttagactctaagtttttgaggataagggaaaaactgccttgtttattatgttgttcacattccaagcagaaaataagcattgggtgtgtttttaaaaaaattaatatgcatagtgatgaatgaatgccttaggaaaagatgaacaaacagaagctgaaagctgaaataccaacaaattatctcctaggatctccttcactttgcagccacagtgaatgatgtgttccataaaagggaaaatgggtgtaaagtgaaagcttcagtctgtcagacagggaggctataaggccagtggtctgccttggcctggtgcgtatttccgtctttctttctgtgaagaaatagatggatgtctataggagctgccacatgagttagtttcttttctagttaccttgtttcaaagccaagggagccaaatctcaaaatgccttcccactcacttggataattaagatgaaaataacaattatataactgtgtagcagaaaagaagtctttaagtttggcaccttgaaagcagtgctcactgttgccactggtactcgaaaagtaatgactctgtgggaaaggtctgcaaagaaaggaatctccctttctgagcattgcagggttcaacatgctatgacctgaaactggaacaagtgagaataaactgggaaagaaaaaaacatggagtggggaaagaagtgagtaaattgaaggtgaattagatgatccgtgggaatactttttagatgccaaggaattttcatttcagttgtaggagagatttccctgatacatcatggcatttctgaagctttcctgtgtcttgaggtgggggaaagggaagtataaatgtttgccattaagaatttggtagtattctggtgatttattcattaacattgtgcggatgagggatggaaaaggtctagtttagccctcaccactctcccttttgtttctcattggagattttattacccaatcaatagattttacagaacactatttgcaggttttaactcatgtataaaaagaagccttcaacaaaaaccaagtgcgggtaacagcatatccttaataccagcatatccttaatactatacataatagctgatgtatagtagaagctcagtaggcatttcctaaaaaatatgactaaatcgggatacatttctgtagattccaagaaggttatgtaaaaatacaaaatatttttatgtttatctacatatatagttaaataaaaataaaagcacttcctcataaaaagaacaatcactttgtcagtgcttctgcatactttaaagaagaaactttggaatcccaggtggttctttttttggacattgtgaagagctgaagtctataggattcgtagaaatgtaagtagttatttttaacaggaccatctgtggccattaatatatttagtaaggtgaatttctttgatgaatttatctaatctccattcgcatttcctatgtatagttttgaagtaacaagtcaggccttttatacttttttttttctgaaagatggtattttcaaaaatatcttaacataaaaatgcttagcctccaggtcttaaaaatataaaggattccctatttaataaatggtgctgggaaaactggctagccatatgtagaaagctgaaactggatcccttccttacaccttatacaaaaattaattcaagatggattaaagacttacatgttagacctaaaaccataaaaaccctagaagaaaacctaggcgttaccattcaggacataggcatgggcaaggacttcatgtctaaaacaccaaaagcaatggcaacaaaagccaaaattgacaaatgggatctaattaaactaaagagcttctgcacagcaaaagaaaccaccatcagagtgaacagacaacctacagaatgggagaaaatttttgcaacctactcatctgacaaaggtgtgatatccagaatctacaatgaactcaaacaaatttacaagataaaaacaaacaaccccatcaaaaagtgggtgaaggatatcaacagacacttctcaaaagaagacatttatgcagccaaaaaacacatgaaaaaatgctcatcatcactggccatcagagaaatacaaatcaaaaccacaataagataccatctcacaccagttagaatggcagtcattaaaaagtcaggaaacaacaggtgctggagaggatgtggagaaataggaagacttttacactgttggtgggactgttaactagttcaaccattgtggaagtcagtgtggcgattcctcagggatctagaactagaaataccatttgacccagccatcccattactgggtatatacccaaaggattataaatcatgctgctataaagacacatgcacacgtatgtttattgcagcactattcacaatagcaaagacttgaaacccacccaaatgtccaacaatgatagactggatcaagaaaatgtggcacatatacaccgtggaatactatgcagccataaggaatgatgagttcatgtcctttgtagggacatggatgaagctggagaccatcattctcagcaaattatcgcaagaacaaaaaaccaaacaccgcatgttctcactcataggcctgttattctttagctatatattgtattattgtgtgtttcacgttgaacgtactttattgaggccattaatttgaaaggaagtacggttttctttcattagaaagagatattgaagtattgtgcccagtaggtaaattgaggcaaaatggcatttattgaaatgtttacatcctcatataaattctatgccaaaataaaaactaaaacctacattgcagattttctagtcgtatttcctctcgtatggctgtactaatagcaattagttagcaatttctcttccatgactgtactaatgattaagttgttgaacataacatttttaacaacaccagtgaagcacctgaaaatgcaactgaataacaagtatgaaaatgctgttttaatatccagttctgttttatgtttataattaatagaactttaatcataatatgtgttctgtgaatcccagagaatattttgctacaatctttgcatggaatcctgtgttttgctctccctatggtagctgtgtggaacttcagttgacctctgtggtagtgtcatgctagatcagaagtaatacgtccaaagtgatatgaaccactgtggtgtctaagacaatatatacccagaggcaactctcgggacaaaacgtcaaaaaggattaagttcctgtgtataacaattctttcttagccgtccttttctatagtgctcattatttcctgagatagccagaaagggaaaattaagagaacataggccataacatttgaaattcttaaaaaataaaaactgattcttatttgtaggccatgatttaatacatgtggaattttcttataaagtcccctttatactacattgacctaactgctgttaaattgttttgtttcataagctgaagtcttactttaattattcaagatacagaggccgggcgtggtggctcatgcctgtaatgccagcactttgggaggccgagacgggcggatcacttgaggtcaggagtttgatatcaacctggcgaacatggtgaaactccatctctgctaaaaacacaaaaatcagccaggtgtagtggtgcatgcccgtaatcccagctacttcggaggctgagacaggacaattgctttgaacccgggagacagaggctgcagtgagctgagattgtgccactgcactccagcctgtgtgacagagcgagacatcgtctcggaaaaaaaaaaaaaaaaaaaaaaaaaaggattgtcttgactgaaaatgggaaatgtgtaaatgtgttgtgtgttgttgtatatgctgaggtcagaagttaggcttatatgcaggagtaatgtttactctttttctactcttgggaaagactgtcataggtggtcagagaggaaaggacattgcaggcagcacagagagctaggataatttccttttttatatttttatttttattgatatataatagatgtgcatacttttggagtacctgcaataatttgatacactgatatagtcacatcagggttcattgggatatctaccaccttatgtatttatcttttctttatgcttggaacatttgaattgtgctttcctggctattttgaaatatgcaatggattaatgttaactgtagtcaccctactgatctattgaacatcagatcttctttctgctaagtatatatttgtacccattaatctcttcatctgctacctactaccccacttcccagcctctggtaaccatgaatatactctatcttcatgaattccacattcttagctctcacataggagggagaacatgcaatatttgtctttctatgcttggcttattttacttaacataataacctccagttccactcatattgctgcaaatgacaggatttcattcctttttatggctgcatgtatggctgaatgatgtttcattgtgtatatatgccacattttcttatccacccatccattgatggacacttaggttgatttccatatttcggttattatgaatagtgttacaataagcaagggagtgcaggtatcaattgaatatattgatttcctttcttttggctatatacccagtagtggaattggtggatcattctgtagttgtattttttagttttttgatgaggctctatactattttccataggggctgtactaattagcattaccaccaatagtatatgagggttcccctttctccacaccctcactggtgtttgttatcctctgtctttttgataaaagccattctaaatggggtaagatgatatctcactgtggttttgattttcatttccctgatggttattgatattgagaatttttcatatacctgttgacgactaatatgtcttttttgagaaatgtctactcagatctttagctcatttttaaattagattatttgtttcttcttagttgtttgagcaccttctgtattctagttattaattccctgtcagatgaatgttcacaaatattttctcccattctctacattgttgattgtttcctttgctcttcagaagctttttagtttaatgtaatcgtgttctatttttgcttttgttgcctttgcttttgaggtcttacacaaaaaaccttttcccaaaccagtgtcctggagcatttctgtgaggttttcttctagtagtttcatagtttgaggccttagatttaagtctttaatatagtttgctttgatttttgtatgtgctgagatataggggtctagatttttagttctgcatatgggtatccagttttcccagcaccatttactgaagagattgccctttcctcattgtatgttcttggcgcctttatcaaaaatgacttggctgtaaatgcatggatttatatctgagtttctatctgttccattggtctatgtgtctgtttttatgccagtgccatgctgatttggctactatagatttgtattatattttgaagtcaggtagtgtgatatctccagctttattccatttgtccaggattgctttggctttgtgttatgttcaggtgcttttataaactgtgattgaacagttgtgcatgtgaactttgtgctaagtgtcactggtgttttagttgagaaatgaggcagaaataaaagttttatttcagtgtgtcatttctatgtataactcttaattttaccagtggactgcctaccagatgatttataacttcttggcacaatttgttattattttaacattcttatttttctttatagcctacagtttacatttttattgttgtatatttttattatacttttagaatgtaggtactatttcattattattttcatatgattagaagccagtgtatatctaacattttccttttccctgttagactctaagctttgtggggataagggaaaggctgacttgtttgagtagcttgttatgctacatttgaataagtgaaaaccataatataattttggtatttaaagttgattaaagaaactctttatgtagaaaaaagatgggaaactaaaaatttggggagataattagactaaggataaagtgagggaaaaaggaaggaaggtcagggagagagttagtagttttcagattgatggttgggggaaaaatattgaagtatcaaaggacaaagcaataccagtactattcctaaagttaatattcacctacatttcaaatattttacattgaaaaattgtagatgacaaaagcttataggataatgccttaaatttttagtattcccaattaatttataggaaggagacaatatatatttccaatattataatcccagggttgtagagattttgagactaaatctctgaaattcctacaataatctaaaggatttactgttgtctataaaagctatcattctcactagaaaattttgagtctgatttcttttccagctttcttggaaaagagtagtgatgcattcattaagtattgaaatctgaaataagtacttgtgacctttctgtaatctaatctaaacttatttttcttggtcaatcaaagattccaccgttagtgggtaacaaagtgctttttggaaagaacaccacttttgcttttagctagaatatgcaactggacttaagttgcttcatatgtaaatgaaaatatttggctaaataagaaccttctttgacacaggcactgtgctagcatgtagtgttttcgtggtcagaacagtactacttcaaaagaatacacaactcagcatggtttcagatgttttcccctctctttattatagacactgttaagaaggaatgttcctgggaagggagcaattttttcagttaatgtatattcataggtaaatatgttggtggttgacacttggccccagggaaagggaatttaaaggaaaaattttatctattttcaaaaaatgaagacacatagttagcctcctcctatgaaacattggtggctttgaataatagttatacatttgcttgattttaaactgataaatgtatatattcactctgctcatgtctgaatccataggattgtaactaaatggttctatctgacttgaattccttttttcacttcagaaaaaggttaaggaggaaaacttcaaataaaaataagggagggactaaaccttagagttacctgttagatattgtggtgattgcggatcctcagagtttgaaagtggactcatagaagtttacaatgactgagcaggttagaaattcttccaagtaagtattttaattgtagcaccattttataaataaaagactactcttctgcatttcccttgttctatttcagaagtttgttatggaagaatgtttgtaagaagggtagagagattgttcaatttatgtgcatttttctgtagatatgttgatagttgttctctgagctaagggctccatagcctctttaaaaaaaaaaatcagcacatcgaaatgatggtgcagagtcatttgcattctctgaaactttgccagtcagaaataccaattgcacatgctcttcattttagcttataaatcaataaaccctgtctgcatgaatctgaatcttttgggaatgcatctgaatatgctctctactactcaagcagaagatcacaggaaggagggaggtcaagagaacagagaaaaataaagaaaagcaagcaaataattgagtgtataggaaataaaaaagttgggtgtttttctttaacataaatgatgcaagtcatctcatttaaagtgtattcaggatgagtataaattattaagagggccttagtaagaacctttaaggaatatattagcagttttacatgtcaaaaacaattttatttttttggaaaatgtcagttacacttagcatattgatagttgggtagaagcacaaataaataaaagtagtttaaaagcaagtaaaaactaatgatcaagtggcagtttgtttctataataccaataataactgaatatttgtatcattaaaagctaaatttggctatgaaaataaatgtttatcatacaaatttaggcaatataaatatatatatgaaaacaagaggagatagatactaacaagtaaacagataactatgtgaattgcaagttcataatgtagactgccttggctggacctgttacaggaaaggggtcccaatccagaccccaagagagagttcttggatcttgcacaagaactaattcaggtgagttcatagagtaaagtgaaagcaactttattaagaaagtaaaggaataaaataatggctactccatagacagcgcagccccagggactgttgattggccatttttgtggttatttcttgatgatttgctaaacaaggggtggattattcatgcctcccctttttaaaccatgtagggtatcttcctgacattgccatggcatttgtaaactgtcatggcactggtgggagtgtagcagtgaggactaggagaggtcactcccgtggccatcttggttttggtgagatttagccggcttctttactgcaatctgttttatcagcaaggtctttatgacctgtatcttgtgctgacctcctagcgtatcctgtgacttagaatgccttaaccgtctgggagtgcagcccactaggtgtcagccttattttacccagctcctattcaagatggcgttgctctggttcactcgtctgtgacagacctacttgctccaggtatttaaggaaccctaagaaagcatgactaaaaagagtgagcaagtgtgaggctggaacaagatgaaactggagagttatcaggtgccagaaaatatatagggtcttgtatgcagtgaccaggagttcaaatttaattttaagtgcagtgagcaagtttttaataggaaacttattatataatttattatttttttaatcaggctgctgtgtgtaggatggtcaaacattataagattgaatgaggaaaagccaattagaaagacagtgcttgaactgggaggtagaaatgaaggtggcaagaaatggtttgattagagagaaattttagagatataatcaagtatatgtgcatgtgtgtgcacatgcatatttggaagggtggcctttgggagagaaagggtccctccctccctccctccctcccttccttactttgtttcttccttcctttttgaaaaaaaataaataaataattgagataaagagcacaacctatggcaccatggtgtttggtcacagtctagtagatataaactctgtacgaagacacaaaaaaaaggtgctatagtctggtacctacactttatactaaataaatactgttggtgtattgagtggtactgaagcaagaagattgagtatctaaaggagtgtatgtttaaggcacttaaaatgcacttaagggaatgttggtaggtgttttagtctgtttaggctgctccaacaaaataccatagactctgtggtttataaatgacagctgacagttctggagtctaagaaatctacaatcaaggtgccagtagattcagtgtctggcaagggccattacagatggctgtcttctcagtgttctcacgtggtagatggggtgagggagctctctagggcctcttttacaagggcaggaattctgcacatggggctccacccttgtggcctaattgcctctcaaaggctccacctctttcattcatgtccctacaaaggacatgaactcatcatttttatggctgcatagtattccatggtgtatatgtgccacattttcttaatccagtctatcattgttggacatttgggttggttccaagtctttgctattgtgattggaaatcatcattctcagtaaactatcgccaggacaaaaaaccaaacaccgcatgttctcactcatagatgggaattgaacaatgagaacacatggacacaggaaggggaacatcacactctgggactgttgtggggtggggggaggggggggagggatagcattagaagatatacctaatgctaaatgatgagttaatgggtgcagcacaccagcatggcacatgtatacatatgtaactaacctgcacattgtgcacatgtgccctaaaacttaaagtataataataataataaataaataaataaataataaaataaaaatttaaaaaaaaaggctccacctcctaataccatcatgttgggaattacgtgtcaacatatgtatttgggggtacataaacatttagtctatagcaatgggtttattagtagaaattatatatgagttttaaggagtgagaatagtagttcagattattttttcccttgggttggtggatgagctgaatattcagacatcagtaagtatatgccaggaagaaggtaaagtatgttaatgagaacttgacctgttcaataaatttcaagtaattcacagaatgagtgtaggaaaggagtaataaaatgggccagaccctcaagactgcctattatcaagtttaaattttatccattgctttcatgcagtgtcactgaccttttttctgtccctcaagtactttcaagttctttccagtttcagagcattcacgcatatggctcagtttgcctgttacatttttcctcccaaatgcctactgtcttctcctcaggtcttaaccctgacctgatggcctacccttaaataaagcatcccccactccacacacacccctgtcactctctaatccagaatctctttctaagtggttctttatgatacttttatctggtattattacattgattcacttgcttttgtgtttgtctcctccactaaaatatgagctttatgagggagggatgtagtcagtcttatttatggtagcattcacagtgcaaagccaatatcaatgcatgaatgatctgtaaatatttgctgaataagtgaatgaacccatagaacaaagaaggaaaattaggttcttgcaaagtgcccttaatcatttttacttttacgctgttatcttctcctttagatatcctttatgagtggactgataatggttcattttggttgcgagaaagaaaacatgctcagttgctctgggagctgggtgtttatggtaggaggttaacaacaacaaaaaaaaagccaaggggatcatctcaataatcactctggacctcagtgccttagaagaagggaagagtacaggaggctttaagggaatctttctggaccaaccattttataaactagtgatctcagtcatcttttgtttacagaagtcagaaattgttctttgctgacttagatatctgcctcctgcttccatgttctgtaagagcaaatattcttcaatgagtgctgctcctttagactgtctctcttggcctcctcttcagccgctggtgtctcacatgttaagcctatttattgcagtctttgagttaagttaatcaccagccctgaattacttgggtgtagtcagatgagcagaataatgtggtttaggtgataataaccttatgtagaaagaactccctgtggctgctaactcacacgtccacagagctgcatacagacgtgtcaggctctaagagttctacagattgtccaatacagtgcttgctttttttttgtttgtttgttttttgagggcttttgaggctgtttttagaatatattactgggagttattaccttcctcctggaatttgcctagtattggtgagctctcagttgttcaccacttgaagaaaagttctacctcctcctttcctgcttcccaagataacaccagacatgtggcgggtactcagatcatcctgaaacatacatcagccatgtcaagtggcctcttttctaccagtctcattccctgtaggttgcatagaatgaccaacctgaagtagggaagcctgaactaagagtctataaattggatttttgttccatttttgcttctgattagctgttgactttagacaatttattttagtatttagttttataatgtgacaaataaggtggttagactaggtgacaatactctgtaaaattgtgtaattgtgttctttttctatctttaaagaagatgataagatagctcagggctatgcttctgaaactggattccttacatccctgggaatagctgtttgccaggggtctgccaagtacatggcattttctcctgaagctttgaccttaaatattttagggaaacattttttccaataaaatgtacatgtataacagaacagaatgttaaatttgcatggattttcaagtaacacatgaaattttatagttattttatatttggtagcctataaacacctttttaataaaggtgaaaaaaacttccaaagacattatcatatctttcatccttgattcatgattcactaatactccagtagacagtgccaaagagtgactagtcagtggttatgaagttgaaggaaggcatctctgcctcatccttgtttttatatgagctgtgacagtgctatttccattatttgagtcatcattgtttataaaaataatgtaggcttctctggtgaaaattttaaaaattattgatggggagtgttccctttgtgaacagtcagttctttagaccagtttgttttccaccaaattgcctgcttctgttgtagcatggaatttttccaccaaaattctatgccgtggttccttttactcctctctgaagaccagcagatcaatgaaaaagtcatgctttcttagaaagagccctataagctgtgatgtcaggggaatcccagcacctagcatcccaggctcaacctgattcttaggacctgattcttagattgtgaacttgtatcaggaaaggtccagatgttaatttataaagggttttttagttgggaggatgacaggcagcacttatttcactgtaattttctcaaaagcaaatttggcagtggtaggtgttggtcatggtgttttgcacatgtacccacaagaatgtgattcccaaacttggctagagtttggatgtcacacctaggaaatttatagaaaaaataatgtacatgttttagggtcctacccaagaattatgaaaggaaaatttctgaaaatttttatagatatgaacatttatttgttttaaagttccctctggatggaggtccatgcccagttgtattgttatctcagagttcacctgtctgtctattccatggactgactataggctgtttgaaggcaggatactttcccttgctttcttctgaaactgccatgcccagcacttatggaatgctgaagtcacatttgatgaatgaattaatatgttatgcttgtgatcagtttcccaggataaaacatctacatgttctgatatcttgtaaaactaattattttttaatgtggctgtgtttagattttaaattgggcctcagaggtgaaaggctagcatattacctacagcccatttatctagtaggcagtactctcctctaagttattgcctcggggaagcccattgcattagggcagtgataacagcatcatgaatagatactaatctatgttgtagcaatcgctcttcttgccctgcttggaagacacagtggttgatgctcctataattagctgttcagttcattgaagtttgaaagtttatgtgaaaattatcagtgaaacaatttatatctagaaaattttctaatagggttctacttagaattaacttttaaaaaaagcacatgtgtcatttggagtgtgtcactcttagcggtactaaattcagatttgaaaggaaattttgtttcaggtcccccttttaaaaacacttctgtattgttttgggaaactccagcattctgcatacctacatgtagctttagttttatttaaccagaaacacacgactattagtagagtgtaactatccttttaatattgctaatttgtttgttaattcctcctgcataagtttgacttgggcattttgtctgatgtaagaccaagcacaattactaatgtgagcaaaagttaatgagcaaaattgtcaagttatatattaagggcatagttagctgtacaacaaagcttttgttgtaggggataaaacaaggtaaaataattaaacatctggcaggagatctaattttggcttagtattttaatcatattctcttggataattataattgattatataaaagttttaggaacttctaagattgcccaaatacatatggtgaaagtacatgtgattattttgcatttaatgtctgaaggtagttgcaatataaatattcatatttgggtgagcaacactgtaactcagctaacacatctgttgtaaataaattctggagtggagagaaactaaacaattgttgggtctgtattttcccaagaagagagaagcaactttctgagattagttgtgagtttataatataatgaaatgtgtatttcttgtcattttttaaggaatatgactgtctgtttccaattaatcactgccagtgaggaaacttagagttcaagttttgtagtttacgctactttgcacctcagcatcctttgaagtatggtagccaagggaaaatatggagttttttaaggaactggtgattttaagcctgaacaaattttgaaagactaatctatgaaaaggagatttgccatcttcagcataattccagatggaaggcagtaggtcaatggagagaagttacgtagagatttttaagtaagtttcaagaagaccttattaataaactctgcaacaatgactgagttgtcatggggatgtgtggtgaatgttctgccctggacatttttaaacagaggttaaaaacctatcagaggcatattttctaaggggagaagaaaacctatattaaattaatactaaatgactgttcgaaatatgaacatctgtaaatctaatttattctccgttcttgatctcatttgtgaagtgtgatgccttctgtggcagtagattgtgttaagaattttattgatgattgaatgctgacgtcaggtttaacccatttcctcttaatcgcaattttttgtcttccagttaatgtgagtgtgttcacattcttagcaatgtaatggtgcctttttcataagtggaaagatattaaagggcattttggatagcaaccatttatcccacctgtattgtagaacacctactatatgctaaaatcagaagcaaagagcaagttgtcagaattcattatatcgctgtgcccttgtttcattccttttatcctttgatctctgtacccctgacaacagatcatgctgaaattggaagtgctgacagtaagaaataaattgccaaagataaccctaacaaatgaccaaaaaaaaaaaaaatacattccattatatcataaactcacaacccattccacaaaaaaccatatgagttgaagaaacactatactttgtaagttgattatggctgaatagaggttaatgacaatgtcctagtggctatttcctgggcttaagcataattcttggcaagggttacacatttttgctttggggaagaggtcagcaacatacctatagtagtgtgctactaggtgaacttcttaaatgaagctcataaccaagaagaaagcaataccagaaaagatagagtaaataaaaaacttaggaataagtgggactagaaaagctagaatagctaagtcctattacttgaccagagtatactagtgtatactctgtatactcgagtatacagagtatactagtgtatacatactagtgtatacactagtatgtaccctttgtaatgttaaatataattttacatgttatgggcatgtggtgggcattccagtccatctacagaaagacatatgaggcagcattgctccatccctaacaccttacagcctcttatggagcctgggcatttctgtattttaatccctaatatatatttgggtggtgaaatgtcatcaaagttaattttttcctaaacactctgtgaattttcagttgtttcttcttaagaatgattgacttgggcatgttggcaataaagaaacagctctttccatcatttgtcacatgacgctgctccctttttatccctgtggctcttggcaacagaaaactgcagtgaagtccacggctcagaactggccccagtatttgagaccacatcagctctttgaggtttaaaagatcttctttcttgacttccgcctatatttaaaactgtcagaaaaacaaaattacccagggagtctaccaaacaagatgctttccttgccctaggtatgctcaataaaaaggaggtgaactgcaattctctcccttaaacacggagttaactatcatgcaaaccagactccatttaaaaaattattccactttatattacatcctcttccacctgttggagttcttaatcacttgtgtatgggatatttaggtttcattttaaattagcagtagcaacttaatagaatatgtaaaataaactctctatactaaaggcatttgcagtgtattgagagcaagtctgttaaacatttaactgagaggagttctcttatagagtgttgtttaggggaaagtcaatgaaatctgctgttggtgttagggtgagaccttataacatctggtagggaaatgctccatgaatgtgagattaaaatcatccctctgggggttctgcggcacaagaacagaagcaaaggaggatgtagcaactcctgacaagcctcagcagtcccagcagctaaactggggtgaagggcacagtgtttttcaacctctgcctcctgattggattgataaacaagtgttgactaaaacttttctagtctgttcagtttatagccacacttgtttttctccctctggcatgttgttcaaaagaattttgaggactttaataaactgtttgctgaagcatttcatgtagcttttgagagttttctaggtaacttggacatctagaactgaatgacagtcattcatccttctttacatgtttagtgcagcattttcagccagttacagcttcaccatggttaatcattagaataaaaagtcctgaagcttaataaaggcttcagtccttaaatgtgcaaaaaatatcatgtttatgagtggacctctcttagttgggagcagtttcacctgtaaatgaataagtgactgtgaggttgtccattgtgaccagtattgctgcacctagacccatgttcaattgaagctgctgttctctcaaaaatgaaatcgtgaactgaggccttcattgcacattcaaagaaatacaaagagaaggaatggatctgtatttcaaatatcattggtgctattggcttagacatattccctttattgggtctgttttgcaagcctaaatttgagcctgaagagtttctccatatgaatgtcttaagtattgcagtggcacatccatcacctttttgcttttgaattacaaagataaccttaagatatgatccatatactgggcaatgtgatacatacacagaaaggatgagcctcctcagtgatgaaatcagccagtgcccaagaggaaagtaataggcagaaaggatagagttgatgaaaaaattgattcttttccattaaactgtacgtgatgtgttttttatgaagcaggcatcagctgaaggagaaatattttttcaactaaaaaagagattgatggtaagggagaggaaaactatgtcagggatcatgggataaatatgtgtcttattctattaccatctcatataatgagaaagttgaaaatcattctattatagttacttaaaatgtttacttggacttggtggtattaacactttttaatgttaataatgacattttttgtaaagttcatgtagacttcatgcatcattgttttctcaattctaaaacttgtttggcttattttcaggtttaccaaagatgcaggtcattaggaactattctggaacaccacccccagctctgcatgaaggaccccctttacagctccaggccggggataccgttgaacttctgaaaggagatgcacacagtctgttttggcaggtactgttgttgcaggaaaggggtcctgatgcagaccccaagagagggttcttaaatcttgcccaagaaggaattcagggcgagtccacagtgcaaagcaaaagcaagttgattaagaaagtaaaggaataaaagaatggctactccatagacagagcagccccgagggttgctggttgcccatttttatggttatttcttgatgaaatattaaacaaggggtggattattcatgtctcccctttttagatcatattgggtaacttcctgacgttgccatggcatttgtaaactgtcatggtgctgatgggaatgtagtagtgaggacgaccagaggtcacttggttttggtaggatttagccggcttctttactgcaacctgttttatcagcaaggtctttatgacctgtatcttgtgccaacctcctatctcatactgtgacttagaatgccttaattgtcagggaatgcagtcgagtaggtttcagcctcattttgcccagctcccatttaagatggagttgctctggttcacacgcctctgacactatccgaattacagtttgttagatttaatgcatgatttattactgcttaaagaaaaatgactcttgtctttagaaactgcatgctttcagcttcagaaactttacatgatatgcggaaaatattttttattaaccttttttatatttactaatgccaaagttgcaacaaaaattggaacactagagaaaaatactatcagtgctgtggggtcataattatcatttttattaaaaattcctactttaccagagcattttttccaaaccgaggacctctgggtatgatctaatttgcatggctttaatatattaacagttcacttcaggggaactacctaattagcttgcctgtggccatttctgaccatatttgctttttacctacccacagtaatacctggagttctcagaggtgctctgggcattattcataaaatctatgaaatgtgaaaagtaagtgagcatgttgatgtttgcccatgatgaaatctctcttggccggtggacctttttatttggttgaaactttttttgaacttaggtaaatatggtattatgttaagattgagtaaagctgttcattaaattctcgaatttcatgtgtatgttagaaatatttcccaatgatgttgaggaaagaattcgttaaaaaatctattgtgcattgagggaaaaataagtgaggaccaacagaaaggttatcacgagtgaaatgtggttagaggtaaaaagagagaaatcagagaaaagactgttggataataatcaattgtgcacatgcagaagggacagctattttatttgcttacatctattttattgtctgtcatcttgttatataagaatgcccaaagattgaacgtttgtctctaaccaccatttcaattgtggtagccagtgatttttccaaagctccaccattcttcttaagtatcccactccttccaaacttcatccttcccagaaaaagaaaagagagaacaacagacttgaattctaccacctcttcagaccacttctgtgtctgtcagcttaaccagaaaacatacttgcatttgtagccataaggttcctcacattcaagacttatctttcttcttggactttttatcccgtattccatcagctggcttttgactcctaaattttcaacttcattctctccactggctcattttctatagtatataaatatgctcagtctcctcccatattaaacacataactcagccttttgtctggtcatgccagacactctttcaccctcttcctctccacaaccaaagctaagcttgttggggaagtagtctatgctcactttctaccactccatgtcctattcataagccagcctcttgcagaaactactccttcttggatcattagtgcaactttatataaaaacagctttgagatggatggtaaactgtgcatagtttaagtgtacaatttgataagtttgaacacacacatacgtacatacatatatataagtgaaactatcactataatcaggataataaacatatccaatatcatccctaaaagtttttgtgccccttggtaatccctccatcatgctccttcctgttgctttgttccgccttgcgcaacaaccctcagcaaccactgttctgctttcagactggagatgagtttgtatttttttagaatttgatgtgcatcacatagcatatattgttttttgtatggcttatttcacacaacatgattatcttgagattccatcacgttgttatgtgtaatgatagttctttctttttatcgctgattatcgttccatgtgtggagatagcacaatttgtttacccgttaacctgttgatggactttcaggttgccactagtttttggctattgcaaataaagcttctatgaacattcaaatataattctttgtatggacataatgcttttatttttcttagatactaatgccaagaggggaatatatagatcatatgtagatatacatttaagtttttgagaaattattaaattgttactcaaagtgcctataccatgttacatttctcccaactgtatttgtgagttttaggtgcctcttatccttgccaacatttggtgtggtcattcttttttttttttttttaaatacagggtcttcctctgttgcccaggctggagtgtgtggtactacaatcgtagctcactgtagcctcaaactcctgggctcaagccatcttcccatctcagcctcctgagtagttggaacaacaggcatgtatcaccatgcctggctaattttttagagatagtgtctagctaagttgcccaggctattctcaaactcctggcctcaagcatccctcccacttcagcctgccaagtagctaggattacaagcatgagccagtcttttaaattttatttattctagcaggtatatagtggtgtctcattgcagttttgatttgcatttctttaatcattaattcattaataatgttgaacatctttttgtgtgcttgtttaccatctatataactttgctggtgaagtgcttgttcaaatattttgtcagctttttaatgagccatgcatttttttattatttggctttgagagctccctagatattttgggtaaaagtccttcataaaatattttatttccatatgcttctcctaatctgtggctttttttttattctcttgataatgttatacatagaacagaagtttttacctttgatgtagtccagtttgttaatttgttctttatatggatcatgctaaaggtattacatctaacaaatctttgcctaccccaaagttacaaagacattctcctttgttatcttctagaaggcttatagttttaggttttacatttagatttatgattcattttgaggtttttttttgtatatggtactaaggtttttttacatgtggatatctaggtgctccagcagcatttgttgaaaacgcaattatttctccactggattgcctttgtaagtttgtagataatgtgttgtccatacatatgtgtgtatatatatctttatgtgtatgtgcacatatatttatatgtactatatatgtgtgtgtatatatatatctttatgtgtatatatgccgtgtgtgtgtatctttatatgtgtgtgtatctatatgtgtgtgtatatatatcttcatatatatgtatatgtaggtctgtttctggactgttattttgttacattgatttctttgtccatctttgtaccaatgtgatgctgtcttgattactgtagctaataagacgtcctgaagtcagacaatgttagtccaaatttgttcttttccttttttcataggtgttttgggtttccttggtcctttgcatgtcaaatgaattttgcgatcaccttgtcaacttcaccaataaaaaagcttgttgagattttgattggaatctcattgaattgtagatcaatataggaaaattgacatcctaacaagactgagtcttctaatcactgaacatactatactcctcatttatttaggtctttaattctcagaagtgttttgcagttttcagagttaaggtcatatacatcttttgtcatatttatctgtaattatttcatatttcattttgatgctattataaatgagttttaatattttaatttatgttgttcattgtgagatatagaaatacaattgatttttgtatgttgatctcttattctttaactcttattaaattcagttgttcttgtagctttccttttgtagagtccagcagattttgtaatatagacaccatgttttattcttcctttgcaatctgattgccttttatttctttttcttgacttgtagcaatggctagaatgtccagtaaaatgtcaaatagaagtcatgagagagtatatccttgccttattccagatcttagaggaaaaacattaagtctcttaccattaagtatgacattatctgtagtttctcataaatgcccttcattaagttgaggacattgccttctattcctagtttgctgcaagttttcatcagtaatagatgtcagatttttctcaaatgctcttctgcatccattgaaatgatgatataatttttgtttttattaatgcggcaaatttgactttcatatgttaaatcaatatttattttctatgattaaatcccaagtggcaattatatattatcttttttatatattgtttcattttcatgtaatacctttgtctggtttggataataatgtaatgttcaaggaatgaattgggatctagtcccttctcttcaactttctaaaagagatttatagaattagcattatttcttcctgaagtgtgtcgtagaatttactagggaagctatctaggcctagagtttccttagtggaaggttttgttttgttgtttgtttgtttattttgagacggagtctcgctctgttgcccaggctggagaggctggagtgcagcggcgggatcacggctcattgcagcctctgcctcctaggttcaagcaattaccgtgcctcagccacatgagtagctgggattacaggtgaacgtcaccatgcccggctaatttttgtacttttagtagaaatgaagtttcaccatgttgcccaggctggtctcaaactcctgacctcaagtgatctgccctcctcagcctcccaaagtgctaggattacaggcgtgagtcagcacgcctggcctagaagtttaaaaaaaaaaaattataaaacaaacatatggctattcaggttacttgcttcttctcctcgagtgagtttggtagattgtggttttcaaggaatttgtccattttgtctaagttgtcaaatttaatggcatgaatttttattcataatatttcttcattatccttttaatgtctatagaatctgtggttgtattatccatctcattcccgatatcagtaatgtatctctttttgcctggtcagcccgactagataggtatgcattttattgatcttctaatagaaccagattttggctttattggttctattgtttttttcccctatcatcgatttctgctctgatttttattactttctttctattcttttgggcttaatttgctcttcttttgctagttcgttaaggtagggtgtttgctcactgatttgtgtactttcctttcttttgctagtatagttagttagtactgcaaatttctttctaagtgctactttgctgccttcccaaaattttgcaaagctgtttattttcattttcagtcagttcaaaatacagatggtccttgccttatgatggtttgatttaatgatttttcaattttatgatggtgtaaaaatgatacacatgcagtagaaactatacttggagggcccatgcaaccattctgtttttcactttcagtacagtattcaataaattatatcagttttcaatattttattataaaataaactttgtgttgtattattttgcccaactgtgggctaatataattattttgagcatgtttaaggtaggctaggctaagctatgatgttcagtacagtaggtgtattaaatgcatttttgacttatgatattttcaatattcagtgggtttatcagggcataaccccattataagtcaaggagcatctgtactttctaattgctctttcagtttcttcttatagattgcttaggaatacattaattagctttgaaatatttagggattgcccagacatatttagaattattttatggcccatctccactgtggagtttctattctaatctgctgttgcatgatatctgagattaccttctaactgatctcacctccagaatcttatggtttattgtggccataatccacatcactgcaaaattcaaatgcaattccataatttcttgttaaagtctttcagtgtcttccttctaaccaggcagaattgcctcttatttattctttccttatagtaatgatgacaacaatagcaccaacaactaatgttcactatgcatttttatgtacaaggtagagttttaagaatatctttgttaatacccatgatactaatgaaaattctataaaatgaattactattattatcctcaatttatagatgagtgaactgaggcactgtgaggttgaatagtctgcccaaagacacacagctagtaacttagcagagctgttattcggacataggaattccggccaagagtccaatctctttactattacgctctagcacttcttttacaatcatgttatttatgatgaagctcatgctgccttcctaaacttcatgcaccttagggatattgggatggtggctgtctttatgctaattaaagaaactagttttgtgagtttctttcactgtcaccatcaaatttgtggcagtgtttcagttttgtgattttttaaaaaatttattttattatactttaagttttagggtacgtgtgcacaacgtgcaggtttgttacatatgtatacatgtgccatgtttgtgtgctgcacccattaacttctcatttaacattaggtgtatttcctaatgctatccctcccccctccccccaccccacaacaggccccagtgtgtgatgttccccttcctgtgtccatgtgttctcattgttcaattcccacctatgagtgagaacatgcggtgtttggttttttgtccttgcgataatttgctgagaatgattgtttccagcttcatccttgtccctacaaaggacatgaactcatcattttttatggctgcatagtattccttggtgtatatctgctacattttcttaatccagtctatcattgttggacatttgggttggttccaagtctttgctattgtgaatagtgatgcaataaacatacatgtgcatgtgtctttatagcagcatgatttataattctttgggtatatacccagtaatgggattgctgggtcaaatggtatttctagttctagatccctgaggaatcgccacactgacttccacaatggttgaactagtttacagtcccaccaacagtgtaaaagtgttcctatttctccacatcctctccagcacctgttgtttcctgactttttaatgattgccattctaactggtgtgagatggtatctcgttgtggttttgatttgcatttctctgatggcaagtgatgatgagcattttttcatgtgtctttcagctgcataaatgtcttttgagaagtgtctgttcatatcctttgcccactttttcatggggttgtttgtttttttcttgtaaatttgtttgagttcattgtagattctggatattagccctttgtcagatgagtagattgcaaaaattttctcccatgttgtaggttgcctgttcactctgatggtagtttcttttgctgtgcagaagctctttagtttaattagatcccatttgtcaattttggctttcattgccattgcttttggtgttttagacatgaagtccttgcccatacctatgtcctgaatggtattgcctaggttttcttctagggtttttatggttttaggtctaacatgtaagtctttaatccatcttgaattaatttttgtgtaaggtgtaaggaagggatccagtttcagctttctacatatggctagccagttttcccagcaccatttattaaatagggaatcatttccctatttcttctttttgtcaggtttgtcaaagatcagatggttgtagatatgtggcattatttttgagggctctgttctgttccattggtctatctcactgttttggtaccagtaccatgctgttttggttactgtagccttgtagtatagtttgaagtcaggtagcatgatgcctccagctttgttcttttggcttaggattgacttggcaatgcaggctcttttttggttccatatgagctttaaagtagttttttccaattctgtgaagaaagtcattggtagcttgatggggatggcattgaatctataaattaccatgggcagtatggccattttcacaatattgattcttcctacccagttttgtgattattatataacagtttattatttctcataatgctatgggtgataaggtggttcttctgcttcagttgatggttggggtggtgggagcagctgtaaggtctcgaatgcccgtgtccacaggattggcagttagtgttagcctctgtctaggaactcagcagaggctttctgcacgttgacctcttcagtggttccttatcttcctcacagcatggtgatcgcagggtacttagacttcctatatggtagctggctcccaagagtgtaaaagtggaaactgctggaccttcttaagcctaaacaccagagctggtgcagaattacttttgccgcttttttttggttaaagcaagacatggccagcccagatacaagaggaaggggaccataccaatcaaataccaggaggtgtggttcaccaggataccaaaataacagtgtgccacagacagaaaacattttgaagccgcatgagcagccctaagaataaaatggttttgtgagctgttccaagggcactgaaagccaatcagtttttcacaacaaagaaagagacaggaagtagtcaagccaaacacaaaatgttgaagatcttggtgcgtataagtggcttgcaaagtgtggtgtttgagatcactctgaaggtcatgcaggagtcctagaaccatgcctaatgtatgcttagaggcatttagctttagaaagataattttggaattcatatttttctaaccaagctctgtttcttttcatcttttttttcttaaaccttagatttgtaaaacttaattatgtatagtatcttttttcatttattcactaatttttcctatcacaggtttagatggtgctttcaattattttcatgttttgagattcattatttccttcattcctcacagccacataatgttaaaagtagaactataattgagattctgtgacaactagcccagtgccattttttactaaatactactgcctcctattctttctagacaaaaagacattattagttgtcatttcctttcagcagcctataaacttgaagattttctggtatagtattagaatggttttggagacacttaggagaatcataggagaaatgagaacccatggatgacaatatatatgggtatgtctggggtatatgtaatgattagaaacaagtaaggctaatgtttagaacagagaaaaacaacacatttatttcagatagcaagtatgcattgagtgccaactctgttcactactcagacactgctaacacttcaattatcagttcctatcattggtttgacattaggtctcctgtctttagaagaatcattttgcttgccagcagccagtaatatgtttgagtttttgcacacatatttaaagttcatctagtgtttcccatacagatgtaacttgggtcagaattgcgttatggatacttctaagccaatcaaagaatttttagccagcaaatgctagttttattgaaatgaaccactggcagtatgagaaaaactaaattcaagtcatgtatctgtagccaaatagctatatggctttggtcaagtcatttaatcattatgtagcttagtttcttcatgtattacctgagtggggctataccagagcagtgcttaccaccctgactgaatcacctggggagctttgcaataatgtcaacacacagcctcacttccagagattaagacacagatggccttggttgagcccaggcataagtagattttataaaaccccagatgaatctaatgtgagccattgatttgattatctaattggtaagagaccatggtaattttgacactatccccagctcaccagttggtaattggtattattaaacgtagctacaaaataaggtgttacacttttacactgttggtgggactgtaaactagttcaaccattgtggaagtcagtgtggtgattcctcagggatctagaactagaaataccatttgacccagcaatcccattactgggtatatacccaaaagattataaatcatgctgctataaaggtacatgcacacgtatgtttattgcggcattattcacaatagcaaagacttggaaccaacccaaatgtccaacaatgatagactggattaagaaaatgtggcagatatacaccatgaaatactatgcagccataaaaaatgatgagttcatgtcctttgtagggacaaggatgaagctggaaacaatcattctcagcaaattatcgcaaggacaaaaaaccaaacaccgcatgttctcactcataggtgggaattgaacaatgagaacacatggacacaggaaggggaacatcacactctggggcctgttgtggggtggggggaggggggagggatagcattaggagatatacctaatgctaaatgacgagttaatgggtgcagcacaccaacatggcacatgtatacatatgtaactaacctgtacattgtgcacatgtaccctaaaacttaaaagtataataataataaaataaaattaaaaaagagaaagtatactagagtggaagaagaaaataagagaaaatttagatgtctccaaatttcttattcttttaccagttttaatgttatataatcttacaaatgtactgtgtagggaccatggaacagttagctgactctgctaaacatgtattatgcctgcattttagtaagtttacaattttagttataaaggtttagtgataaaattgtaatactcatatttaaatgtattatgataacaatgcatttagtataaatataaattttatatatctgtaaataaaacagtatattttatgtctcaaaaaaaaataggtgttacaatactttggctttgatagttaccaaataaggggtacctttttgacaaattagtgtatgatttaaaaaatcacttgctaaacagtctttgtaccgaacttgatatagtcttctctaattgaaaaaagcacttaagatcttacaatgtttcaaggctgtcatgattaaattagcttttgtttcatagactggacatatggaaggtacatgtaggaaactgggttgaatctgtacttactcaatggcgtaatctggaatgccatgtttttaaaaaaattctgaacaaagacctttcctccttattgggtctaaatgtggaatcatgtactggttgatcctttgaagccatgtgtttttttaggcatgtttacagtggccccttttatgttaatttgctgattttcatactcaaagaagacatgtactttatggcttgaatcctaaaatatgtgactcccccactgggaatgtgttttaattgtttttgagaacatagtttttaagcacctctttttggttccttcctaatcttcagagtctacacacttagctctggagaagcaagttatgtgtttaggaaataatagcttattttgctgagtgttactgactctgccatctataccagtgtgactttaaatagattacttactctgaagtgggcctcagttttatctgtcaagtggaagtaacaatcactgcatacaaaataaagcaaatacacaaaggagttctagcacagtgcccattaaatagtggctcctatccatccatccatccatccatccatccatcctcccatccattcttccatctttttatcctaccattcatccattcatatacttataaagtgcctactatgtaactgactgtgtttcatgttgggagaaccagaaactagagaacccgtttctaacctggaggcctccatgatgtaaggaatgatcagaactcaggataggtaatgcacctggttttcattttgagttttgtaattaaggtttttgtaaatcatattgttgcaaatatatctagcgttaaacctatagataaaaatctagaaaacttatcgagatgttacaatggctttgtatttgatttcaaaaatgtcttttgtactagttaggtgctttggcttatttggaaatttttgagaagttatgctttctgacctgttttctctgtttttgcaagttgatgacttcactcattagtgtgggaagtcagattttgtagtagactgtcatgttttccacatactctatgtcaggagaatacaaattatcctctactatatatcaggaactttctttctttgaatagctattaatttagtctgtattattattataacaacagtaatttctgatgctattgaatgaatgggctatctgcattttcattattacttctttcaaacaatgaattatcaattgagctgtaaaaatgtactctgttcagtctttgcatttcaggattccttttggcagcattttcttttcttctttgtcttcttctttttttcttcctcttcccttgaaagctctataaaattgccttcaagtgaaatgaatataaaataggaaattggccatttggggcacgttttctagtgcaggtgtaaggcatagtttttactaagcctaacaacatgcaggacaattctgatcgtgtcatccaattgatgatgataaacatgttgcttttaagtctttgttgcaatatgtgataaaaaagtcttagtaactcctgagaatatccttcatgctggaagaaattgttcatattacaaactttattttcccagaaaagataactatacttatcacaaaggaagagagggcaagacagagaaacaggcaaatgtaaaattaagccatgtcatctatggtttctattacaatagaatgcatagaaaacatagaaatatgtgttttcttcttagaataaagactgtgaaacagtgaggattctgtgtcttatatcatggggttttatttgctccattgtcatttacgaatatccaaatgttccacagggagagttttgtaagctaattggaaccaaaaggcaattataagcagtagaactgtaatcagtgccaaaaataatatatatttttatccacaatgcaagttaaataacttagaaaatagttgtgatacttcatgcttactaatcatacatctacacgatctttattctaagaagtgaaaatgtttttacacacattccgattaattcacaaggtcttcataaagagggtaaatggaaaatcatgttaccttcatttagaactgtgtctttaaagggccaaatttatgacctgtttataaaattgcagttgtagagttaaaactagagtccttttcagacttgtggtcccctactttagttctatatattagaccattgtactttgttttaggagagtcatttaattttctaacacctctaagaaaaacacacttttaaaggcagttttgttattttttggtagaaaaaatagtaaacaaaacatcactttatgtataactttttgtgtaacaggaagagtcacacagaaaataaaaagtcagaaagtaagttgagcttagagagaacttggaggttctcaggaggaaggaagcatttctagtcatgctgatttcagaggcaacgaacctgggggctggtgggctcttgacttggccaggggcaaccaggtgctggattccctgctaccatcctctcagccatccagacacaatggtgatgaatgttctgtaagctggcctttgtcttagtttaccttgtcaataatttttacttcccacaggactgctgtatttggtcttcaaacagtccaggtgacttgcttttttttacagatactttttcttcattttaagctgaatagaaaaatgaagggctgattagggggatctttttcacaggagacctgttttctcaaacctccaaccattgatgtatatgttaccctcttcctggttttccctttcacccccgttctgtcagctaaatccttccttatcatcaaggcacaatactgggttgccttttctgacgtcttctcagaaccaaaaaggcttctatcataacacccatcatactgtgtcctaagggtctttttatccttcttcctgcctggttagagcactccagaaatataaaagctatgggtttcattactttatctcagttcctagaataaaataggcattcagtccataggtctggaatgaataagcctatttagagttgtgatctccataaggtgttatttacaagttttaaaaggaattgtttattaaattatactttatgatgtcatttgaaagaccattaaagtattttttcatctgtcagatttaaatgtgccttttttctctcagaataattttaaaactacttaacattgtttcctcaaatttctcctctataaaatgagattttaattcttaaatgactcatggagtgttgtgagtctcataggaagtaaacttgaaaagagattgaaaaggagaaaaaagtgtatttgggtataatgattaatgattttgaaagacatgctttattttccagaaatggaaaaatgataatcaggtattttttgtttctggttttgtttttaggtttcctcttcccaatatttaatgtgaagagtcccactggcacatatggtctcatagaagactattctgccttcccaattctcatacccagtttttgaaatttctttaatcagagattaaacttttacttcataattagacataaaaatgcaaatgatcaattctgaagagattggttgatttaaataatcatcagggtaaaaatcatgagcccttttctcagagcaggtttgattgaggaagacccaggatacctcacagagagtgatggagatggggaaggaaaaagagagataggggtttacagaaaacaaacgctgcctagggaatgtgactgagaacataagtgatctgtgcaataacgcacaacccagaaaccctctgagcctggagaagggaggtgcagctgagtggagttagtagatctttccctccagcacctctccctgaaacttcagaaatcagtcacttcaaaggattcttttcctttgccctagattaaaaggagacttctaatcctttctagaccacacaacaatattagctccagtagaattttctaaagctgtgtatttttcttcctgatctaaaattcaagtgttagtctgcatcatcatcagagtcaaagaagaacattacagaaatgtaagaaagaatcagatctcctttgttaagaaaactgattccggacaccaaaagactcattgctttgggttataaaccagagagtaaacatttcttggaactggtaagtgtttttccccttcagattcctatccaagggcatttcttcatgatgtctcaaactcagattttatcatggcaatgatccttttaaggcagtgttggagcttgttttcccagtgtcccgctgttcatcttggcttttcttctaaactgcctcttaccactgatttattaaccccatcccttgagtaaaatcagtagaagccaaggcagaattgaaactgtggccatggggataaaaagctatgtgaaagtgtagaggctcagtcggcattagtatgtcctgtaatcatgagaccttgattttgacaggtatttgcctgtaaatactgagttaaatcagagtccctaattacaggaaaggagaaaaaggcagtatgtgactgcactagaacaagggaggccttgggagagatgattatagaagataataggcattagtaaaggcctgtaagaaacattttccctgggtgattgtcaactggctttgattaaatagatcataaactgaatttgcaggaatgtttccaagtgtacagactgtagtatgggaattggcaggcctcctgacaaagtgggtgaggtcctaattgttaattctcaaaatgggcatttttggttaacaattcttgtatttttccaatacttggtacagtgcaatgtaggttataatatacttagatgaggacagtgccatctaagtagaagttcagacaatgaagtattatctctttttttttcctgcagggtaagggagtaacattatgggagaaagttctgagaaattctgttgtggtcctttttcttccattattttattactatgtaagctacattctgccataatgactaaaagtttgtgtcaatcacagaatactttcagtgggccatgaatttggaattccatctgacgtgattattgatttgatggtgcaagtggtttcagtaaagtatgcatgtgcacatgcccttaagagttgtggccaaataatttatcaaattatagcatatattgaattttaattattcatgataatttgaattcctgaagaatgaatcaatgaatgcaatttctaacaaatcaacctttatgtgcttcggaaaatagaccgcttcacactgagttaaaaacgtcactaagaagctgaaatgtccttgtcttctgtaaataaatgctatcagattaaattactggcctggcacagtggctcatgcctgtaatcccaacactttgggaggctggggcaagtggatgatttgaggtcaggagtttgaaaccagcctggccaacatggtgaaaccccatctctactaaaaatacaaagattagccaggcatggtggtatgtgcctgtaatcccagctactcgggagactgaggcagaagaattacttgagcccgggaggcggaggttgcagtgagcagagatccagagatcgcgccattgcactccagcctgggcagcagagtgagatgccgtcccaaaaagaaaaaaaaaaaaaaaagattaaattactgacacacatcatccctaattaagaatttgtggatcaaatgttttttggccaaccatgactgagtggagtactgtgggggcattgcaaaagtgcttatataatataagcaaagaacattggtggtagccgagacattggaaatccttaggtcgtgctctgtgtttcacaggtgaggataatgaagccaagaagggttgaatgacctattcaagatcagaaggccaaaaataaaacccaggctcccaactccctaatcctatcaaattatcacctcacaggttttttcctgatcaaaaatatcacaaaaatctatgaaaataaccaaagcaaaagtgaattaaggaaatggcattgtctgaatgagatccttgaagattgtgtccacgtctattcatttttaattccttagtatgtaacacagtgccttgtgcatattaggaagtcaataaacttttctttaaagcactacttttgcttttagtagaaaagtaacattctttaaaaatatctcatgctgccatgagcatttagtgtttatggtgctatgactcagaatattttctttgtaattagttatgattaaaattgccaaggatagaaaaacattcatttgttgtctgccagtattagaaaagcaaatttctttggacctttgttaagcctggattggttttgggttatatggcttctcaccaagatatggtagaacctgattctttccagattttgtattgagtaacaacgtgggttttggcttacctacatgtagactggtttttgttgccaaattttttttttctatcattaaaggtattctcttgtttctttcacacacacacacacacacacacacacacacacacacacagtcataagactataatttaggattgtatcatgtacatcccacccagtgagactttggagaaaaaacattaagacacccatgatcagaggattccctttcttgctgcagaaacacagggacctcaccaaatacatttttgagtaacaggagaaagactcggtgaagtctcattccagtgttgtattcatctcaaatctacagcttatggcttttagtgggttttttttctcagtatacatttcacaacttttaatttttaagggtttttgacacttccatctgccaaaatttcagagatgtaataaacacaattttgtgtgaattggaaaaaccatcaactataattgaagcctttgtcatgtattttgatgactcgatgcaattataaacccatacaaattgaaggtaaatttaatttcagagatcctagaccaaggtatgagtttcttagacttattcagaattctaagccaatgacagccactttacaagagaactatgccagagatagggacattttgtactgtcttttgaacaacctcatgaactttcactgtttatacattggacaaaagttaaggatcatatccccttttgactaagaaataacaaaaatgcatagcttatggttttgttcttttgtatgtgtgcatgagtattttggaattaatggtagtggccatcatataaccatatgcaggtaggcttggcaagttttcaaagtgttcactgatagaaaatgcatatcttactcatcatataggaagcaattaacaatgaaagaatatgtgtactgccaagaaagcatttgagtaaaggaatggactgtcaggaatataatagttcccgttcaggtgaaagtgatatgagagtctatgttccttgcggcttagcaagtttactgaaatataaagagtggtaggattgtacataggattagacatttctattttaataacacatgaatgggccaaataaaaaaggaaaacttagaaatgaagtaagtgattgacaataatcaagaaacaatattatagataaaataaaacaagtatttagcatttgcaaagtactttcatgcatattaattctttgatccttgtaacaacctagtgagggatgtgtggcagatcttgtcatcatccctgttttaccactgaaacttgcaaaaggttgcacatctttttatagcagagctagaaatagaacaagctcttctgatgacacatcctatgatactgcctttgtgtgttttccaagaactatcccttatgtatatgtaactgatgatggttacaatatggctgcagctgtgattaaaaatctctccttaccaaaggctagtttctgactcggtcttttcctgatcacttcctctttgctggtttttttcttttattgcatgtcctcacaaacttcatcagaataatgccaaaaacagtgtgttcatctttccatccatccttccttccttccatctgcccatccaatcaataaactaatttgtgtatacagtgtattcacctatattcccattattcatggccatgctgtacatcttctttccccaaacactcaacctgtgtatttctgacagcgggaagtgactgggcagggtgacagtcgctctgaccattacccatgtgtgataaattgcttagtaatctccacagcaccatcgtgcatacattgagagtgtttagggcattgtaacttgggagaatttccaatcgttcataaataaccattaatctgtcccttttacattcagctttccacatctgtttcaaattgttcagtgctattccaggagtgcattaaggctccaatccaggtagtattaaggggataaatgagccacagggaagagacactgtatttttctcaaagcagttctttctcctttttacagagttaggagccaagcaatttatgattaagattttcagaagatatgttttgtcattttaagccatccttgtctgtgggtttaaaaatgaggttttagctctagcatcctggcataccttaatgtatttctctgtacaggtagattgtgaatatcatttctaccagcaaacctgaagtagttttaattcattatgattcagtgtggattcttattgaagaaaaatgaagaatagttaaaacctaaggtcagttagaaataaataagtgccagagtatgcatttatgtttgtgatgttcgggaatgtcagaagaagttgtcaataattttagtttgatacattttctacaggaaaaaaattgcttttcaggaaaaaggcattgttattttatgaattataatttaatattatgttgctttatgtctgctccagataattgaatgaaaattatacaggtgcatttttttcttaccatatagtacccataagatattttctcatgtgctttccaaagaatgtattttcataagaatgacccaacctgtactgttagatttacaaaagtctcatcacatagtacagagatgccctgcagaataaatgcatataaagatagcaccgtatggtatatcagatgacacctaagtatgagagaggaatgttttcaagttgaccttgaagatgttcagggacttacagaacaaatacgaggcaggaggataactaaaagatgattccctatctttggcatttgtaatactcataaaagggatgacaagctgattatctgacccagaataaaatgcccacagagtaatgtaaagaagaaggaaattcagttgcatgtctctcaccaaggttagtaaaaacctcatatcatcacataaagtgcactaaatcattggatttgaggttggtctatgtcatagttacagtctgcaatttcatccatgcataggggattgacagctgctccacccattagtattaatgaattaccaacgtacatcccacacacatccaccaagaaaccaaagaaagccctcctacacactactttgttttgaattctccaaatgttgtaggatagctatctttttaataagtagaagttattatatagctaaagctgataagactaggaattagtaagtaattgtaactttattcatacgttaaaataggttaaattatctctcacctctctgtcatctacagaatgcctatgaccatttaagaaatgggacctgaactgctagggcattttattaaggaaaaaacaattcagaatgacattggcagcctgtttagtgaaattttttccctcctgaaggacctccaagagtgtcctttaaaagaggtaaaaaaaaaaaaatgagttttgatatgatgaccatgtgtacttgtttacccagaacagttcagtttataccatttgttctggcatagttattagtcactacccatttactctcaaaaggtcctgatttgaatggaaaattatatgttcatctagttttagagcatttcttatacaaccacggtctcttcctctacccctctagtatgatttcagttcccatttatgtcttttgtgtggaacacctgtttctacaaaggaagaaagaaacaactatgccagtccatacactttcatcagctaaaaaattcatctctttttcctactcttttattctttgggttctcatcctcttttctctgctttgtgacattgcactccccaacgctgtccttatagaatatgtcagggacaggtcaaagaatgtcactatatgaatattttcctatagaaacagtcagcttaatccttgtcagtgcttgtctgtgtgaacaaaaaaaaagtgacatatagtcatgagttacttaatgacagtgatacatactaataaatgcatcattgtgtaaatgttatggagtgtagttatacaaacctagatagtgtagcctactacacacctaggctacgtgtatagcctcttgctgccaggctacaaacctgtatcgcatgttactgcactgaatattgtaggtagttataacatttgtgtatctaaacatagaaaaagtacagtaaaagtatggtattataatcttatgggagcaccatcattataaagttagtcattgactgacatgtcatcatgtggcacatagctttattttattctttttaatgaagaggaatttagggccatgctcctcattgacagggaactatcagattgagttatatctccccttagaaacatttattaagggcccactctgtgtctgacatcttgttatacaaaaatgactgagagattatcccttatgccaaggaactcacagtctattaatagagaagaccatgttgaacaataattacatatactactaggagtgaatactactaaagcactactacttcatgtatcaccaagggtatggaaaggtgtgcatgggattcaatctgggatctgctccttggggaagagatgacagagtaggtaatgtgtgaactgagttttggaggaggaacagaatgaaggtatcaatttacatgaggggctctgcatcaggtttgctctgagaaagtagatagcattacattggccaacatacactgtcacaaaatgtcacttattctcctgtacactgcattctatagattaaagccttttgttgttgttctgaagaagagtggaagttgacagtttactatttataatagccataattttccaatttgttgatacaccttcaaatacactttggaaagaccattacagagctctctctttggcctttcctcgcaaaatagacttatttcctttatgtactctcaaaggtcttgtttgttttttaaagcattcttattcttttctcttctgagcttaatcagtgtatggttcctaccacactcctttatattttgcactcaggtagcattgtagtgtgtttatatataaaggtctggctagtggtatagtcccaaataccatacttatttacttgtatctcactgcctgctgaaaacaaaccattatagagcacttgataaacacagctgaatgaaacaaacagttcacccaaccttgtagttactgctaccatccctcccaggtctctgattcctctctctcctgatcgtttctttctgccttgttgtttcactagtttctgtaaattctgtcttctatcttctctctacattttttccaagtgatgcagccttgctccaattttcagattcctctctaagtcatctaagtctgtgttgtatggatggattctctagtcacctcctacctccattcttcatacttttcccagtctttaactcagaaacagatcatcttctcttcccatatctaatccactggccagttcagcagacttagttaaatagtgtcttcagcatgtgtttctctccctccaattcctttccttaccatgggatcagtttccttgtgatattctcaactccgaaagtgagacccatctaggagccatattccacattggtgcaagtttaagtcttctaaaacatacaacacctttaaagaaatgccatcaccaatgacagaattcagctatcactgtcaaattgtttcctaactactttttatatttaagtcccactgtctttcttcatgagtctctattatgcttgtacagagaggcagtgcagagccctgaagttagaacatctgagtttgatttatggctctgtacttgttagctctgtgaccatgggcagattatttactttctctgtgtctcattttcctcatctgtaatgtggggatagtaattggacctaccataaaggatcatagcaaggattaaataaaacactcagagcagtgtctagcacatattaaggattcaataagtattagtatttttgcagtttaatgataaaaaccacaattacttttgcaccaacctaatagagtcctattctccaaaatcttacggtcttcttctgttaataagtatcctatttctttttcttaaatctgaaaatcatccaaaacttacatttcactgttttctattttcacatcttgaaatctcatcttgctagaaagacattctcatgtcttctcttagaccggtagtatccatttatatggaattcataattatatgccttcacaaaattcatatgatctgcttatgccaatgaatataaaggtgaaagatagaaactgctgttatctctctatcgtaggtgtccccaacccccagactgtggcctgttaggaactgggccacacagcaggaggtgagctgccaatgagcaagcgttactacctgagttccccctcctgtcaaatcagtggcggcattagattctcataggagcgcagacttgactgtgaactgcgcatgtgagggatctaggttgcacttcctttatgagagtctaatgcctgaggtggaacagtttcctcccgaaaccacctgccacgcccccagcacccacctcacctcaccccacatccctggggccaaaaacgttggtgtccactgtgctataggattgagagatataaagctaacaaaattgaagggtagattgaaaaataaacttgaattattttatgatcatgacctgaaaccacatgtaaagttgaacaaccaagaaaactatctctgcttttgcttccttttctgatccacagtaagttaatgctcaggactggatataacacataaggaattctaaggatcctaagtaacagtgctatgtatggggcatcatggggttatcatttgtggtaaatttgttctcaacactggcattttttttttttccttagggcagaaatttagcatctggagaggttggattttttccaagtgatgcagtcaagccttgcccatgtgtaagtattagtatcttaattttctcttgcttcattttgtttttgatcctgtgattaattgtgcaaaaatctacaaaggatactggccaggtcagttattaattttattaatattttctggaagaatcattattttcaacatcattatagttctattgtcagaatatgttttttaatattaagaaaatatatagaagaggcaaattttacttagtagaatttatataactaagtagtctaaaaggttttagaagaaataaaccacagctacaaattagacgcattgtacaggtttcccctttcccactgaactgagaatggtacggtctgcctccagtcacttgggttacagggcgatattacacttcagctgatgtctttgaaagcttgctagaaaatgaaaagtccacaaatttttcaatcaaatgtctaaatatattttctatactttagtgtgacattactttttatataatgtcataatggaattttctgaaaatataaaacacagataaaaggagaataaatgaacatttcctcaattaatattacaggtgaatgtaacctaaaatgtactccctggtgtgttatgatactgataaacttctgtttagggtaacatgattttagtatcataatatggtattatgggtgacgttttccacacaactttttaatttattgactccaaagtaaatgaaatttctttactaatacgatggagatgattgcctgaaggggaaaaactctccttaatctatcgtgcttgctatatttcagtagttactgaatttccaaactggacattctttttactgttagaaacatgagaatctgccatccttggctctagaatgtgccctataggataatttactccactcattcaagcttaattactttcaaaatcaaagagaatagaaaagcgtctgttactctgttggttttgtgatctaatatcacatttgtttaacttttattttaggtttaggggtacatgtgcaggtttattatttgggtaaattgcatgtcatgggggtttggtgtacagattattgtgtcactcagtttctaagcatagtacctgataggtagtgtttagatcctcaccctcctcccaccttccaccctcaaggaggcccctggaatctgttgttcccttctcatgtccatgtatactcaattttaactttcacttataaatgagaacattgttacttgcttttccgttcctgtgttagttcactcatgataatggcctccagctccacccatgctgctgcaaagggcatgatcttgtttctttttatggctgtatagtattccatggtgtatatgtaccatattttctttatcctgaaacatatgggcatttagattgattccatgtttgtgaatattgctgggatgaacataagcatgcatacctttatttgtagaacaatttatatttctttgggtatatacccagtaatgggattgctggctcaaaaggtaattctgctttaagttccttgagaaattgtcacactgctttccacaaaggctgaattactttacattcccaccagcagtgtataagcattcccttttctctgcaaccttgtcagcatctgttatttttttactttttaataaaagccattcttactgatgtgacatggtatctcattgtggtttcaatttgtatttctttaatgattagtaaaattgagcattttttcaaattttttttggccaattatatgtatgtcttctttccaaaagtgtctgttcatgttatttgcccactttttaatggagttgttttttggcttgttaatttatttacattttttatagatgctggatattagacctttgtcagatgcatagtttacaaatattgtctcccattctctatgttgcctgtttactctcttgatagtttcttttgctgtgcagaagccctttagtttaattaggtcccatttgtcaatttttgttttgttgcagttgcttttggcatcttagtcattaaatctttgctgggtcctatgtcaagaatggtatttcctaggttatccttcaggggttttatagctttaggatttacatttgtcttcaatccatctcgagctgatttttgtatatcatataaggaaggggttcaccttcagtcctgcatatggctagccagttatcccagcatcatttatcaaatgtttagctgccacttacaagtgagaacgtgttatttgcttttcctttcctgtgttaattcacgtatgataatggcctgcagctccatccatgttgctgcaaaggacataatcttgtttctcccctttactgaacagggaatcttatccccattgcctgtttttgtcagctttgtcaaagatcagatggttaggtgtgtggcattatttctgggctctttattctgtttcattggtctataatgttacatattttttgtcttatattacattacagtcttgaaagattattgaagtttgataccactcttatttaattagataagctaaaatgattctctatctagtttttggactttgtatgaacaagattcaggcttcctatctgtaaagtagtgatgtatatctgtaggcaggtggcaggatattatacattctaacattaagaagtttgggaacctaaagacatcaaatcaagaatattaagcattgaatgtaccatgtactgttttctgtttacatcctcttgaataaggcataaagatgagcacttgaagttttgttttagggatagtctcgcacaaagtaggcatttaataaattactgttgaatgaatgaacaaaggagtgaaaaagcaaatgcaagtccctagctgtatatagaacattagcaatggtagatactaattaaatcagcctgtagaatcatattgaatgatatttgctgacccaagaagtggctagaaggagaaatatgttcagaaattttaagatgacagagaagtagagtaacttataattgtaagcaagactactaaatatggttgttttatattagtagctactttaaattttactgcttaatgaaattatagattttttttttaattatagggcaagttaagtgaagataaatagaggggaatttgaagaggaggggatagattgagggagtttagaaaatggtattgcttttgattctgggatatattgtttatcggggtccatgagtagtgctgaatgttctattctgggcttaaaatttattttcctgcatttgctacatccatctcctcaaaaattctgatataggcaggtagaaaccaagaactgaggaaaacacaggcggttcataaatgggtcaacttcatttctagcaatatggcaactagagacaaagcctggaactgcagcacaatgcaaacttgggtatatccccgattccaggagctcttggtggatgaactaggagaaaacccatcccactgatgatgatatgcctactttggtattggttcaggattggaaagaaaaaaggaaagcagtatcccctgagaatttctaatcttaaatccaaaaccatccagatgaagggctggaattcataccagctctactacctaaataattctaagctagaagtgtagtttaaaattattccagattattccactgcactccagtctgggtgacagagcgagactccgtctcaaataaaaaataaaaattaaaaaaattattccacattgattattctcccaatgaaaattcaaatgctgtctggattggagcctctttgcacacattcctcaaaggatttttaacataaagtcctaggcaacatacactcacaatttgaaatcattaaatcaatccagaaacaaaccaccttatgccaagatcagcagaaacaataaaatatataattaaatccacaaatatagcagatatttgaattttagatactaaattcaaaattttatacttaacatggtttaagaaattaaagggaacaaaaatctaagaggaaaggaagacactaattgggtatatatgaaaatgattcaggtatagtaattgaaataaaagccttaatggacatattacatggcatatcagacacagttgtgtaggaaattgaggagaaatctgaagaaattgctcaaggagcagttaagagagattaagaagttaaaaataaaacagaaaatggagtgatgagatacaaatacatttaatagaaggagagaatagagataattgtagaaaagcaatattcaaataaacaatgcctgagaactttccagattctataataaaactaatcttcagagtcaagaagcatatattaaaattaatcaacacctggatgcattgtaatgaaaccagaagacattaaagacaaatattaaaactgagagaaaagacagattatctataaaaggttgattattagacccagctaacaacagaaataatagaagcaacaagagtttccacttctggtaactgttgaatagctcctattggaccaatactcccacacataactataacttgtggacaaaatatcaaaacaaaactatctgaaggcactgcccaggagaagattgacacttggaaaaaggaatggcactaggatgagtttctttgttttatggctagctcaaaggcaggcactggattgtaccatgcagggtagctaaaattcagatagaaaccttatggtatttctggcttaaagaaccagattatggagtgagtttaaagcagtctcagcagctggaaaaggaggtaggaagtcttaaaaagagtcagagagaggaaacctcaaattctgtgtataaactttaaggaaagccaggttcttttttggaacataagaaaatacagagcctctacagtttatcattcattcaaattgtccaagatacaatataaaattactcagtatgcaaaggagcaggaaaatgtgaaccatacttaacagaaaagagaatgaagggagatcaaccctgtgatttcctgtttgatgacttaggaaaagattttaaaagcagctgttatcatggtgctcaaggacacaaaggaaaacatgttcataatgaatgaacagaaaacctcaaaagagaaataggaactacaaaagaaccaagtagagattgtacagtgtgaaactacaatgtctgaattaatatctgaaacaataagaatatgttaaaagttgtgagagaaaattactatcctcttagaaatttctcaaaaaaaggatgaaatcgtgatagtttattcaaacaaacacaaacttcacttctaagtgtgccatctagcttcataaggtatacttcaggaagaagcacacataaatagacacatatatatttatttatatatatatatatagaccaatataaatatttctgtatgtatgtgtgtgtgtgtatatatatatatataattttgtacggatactatattctcaataaaatgttttttaaaaactacatgttcatagcagaagttttgcagtgttaatggactatggtgctgggagaaaatggcattagagaaaaatagtaaccatatactcaaagatgaaaaagttcccaaaaggaaattaactgtaatcttaaatatgaagtacttgccagacaaggacccatagtacacagaagaaagtgcagagggcctatgactgatggaaaaggataggaccccacctgagtaatatggatcatggctgggaaggtagtcctggatcttcacatgtcagaatgcacccactgaagagagaaaagctctagtgggacaccagggtggaacagcctcagttacctgttctgttttagaatcttctgtcactgtttccttttttggatctccagcctttttaacagccaaaggagtccacagccagaatattttgaaattctttactctcctccttcctgtctccttttttttgtttgtttgtttgttttttttttttggttctctatggaaagcttggtttaagaataaatatatacattatacttttaaagaacacagggagagggaaagaggaaatatttttcgcatcacatttcagaagccatgtatatcttgtcatcaaagggtgaactattgaagatcagtttatttgtgaaagcaaagttatgtaagaaactatttgaatgattagaatgggtataatttaccttcaacattaattgctgtttattaggattttacaaagttgtgattttaaaaatgtaatccataggataaaaatatttgaatattaataatcaaagaaatgttctgactagaaagatgatttttgatacagtttgagtattcctcatttgaaaatctgacatctgaaatgctctaaagtccaaactttttaagcactgacatgatgctcaaaggaaatgctcattggagcacatacgattttagatttttggattagggatgtggaatgtaattcaaatattctaatttttttaaatccaaaatgtgaaacatctctagtcccaaggattgcagataagggatgctcaacctgtagataactcttaacctggaagggcaaaatagtaacagcacattatgaagaccagcatggctagagacatgttcacattggctagttctctgaaatactatagtttttactgttccaaatgagggaacagtattttcaatcaccaaatataaaaatcccattaatagcatggaatgcatatatcagatatttggacatgagacaaactatctgtactcctattcgtaggaatttttaaagtaaccctctctatagaatgtactttatttcttatttttaacattaatatacctgctttgtctttgttcattttctatttgaccattagcagctacaagttttctttctttgtttgaatagcaaatgcaatatttttccttgtgcgaagctctatgtgaaacaaatggaaaaataagtattttccatgccttttttctgaataaaaggttcttagttggtagatttttaaatcagaatttggaatttattacaaaataagagtctatatccagtgtatattgtttattttgcatgttttcccaatgtcttggaaaagtaaagagctatttggttttcttaataatgttttcactttaattttctttgataagattaaattgccttgataataaataataaaatattaaaaatattaaatacccacatccagtgtatattttttattttgcatgtttttccaaggtcttggaaaagtaaagtgctattcggttttcttaataacgttttcactttagttttctttggtaggattaaattgccttgataataaatattaaaagtttccagttcatattcgcctgctatctctcctcttagagttacagtggcagtaaaatgaatgaaagaatgaattaaagtgaaatgaattattttctacttatctgacagatactatgattcactctgtataaaattaccaatggatagttccaggactgtgccacttagggttttatagagctgagtcagctgaactgaattaatgattgatttctaaaagcttcccttatgtaaacttaatctgtttttgcttttttatatcctaggtgcccaaaccagtagattattcttgccaaccctggtaagtattaaaaatgtttatgtagctaggttgaaataccatacccttagctccaggatgccttaaatgtgggggtagtaaaccatattccatttccatttgtctcggctaaaggtgttttcagatgtaacaaaacaccataatgaattcatgtattgctgacctttccatatctttatctgcgaggggggtgtgtgtgcatgcgagtgcccagtgccctagactgataatttaaagtttataccagccacagaaaggaatggaacatacgcatatgtatcttatattttacagatttaataaagcagagagaaaaatatgctttcattgtctaaaaactaaaaattagctcaaaaaggacagtagtagtttttttttttattttttatagttttagagatggggtcttgctctgtcacccaggatggagtgcagcgatgccatcataacccattgcagccttgaactcctgggctgaagtgatcctccaaagtgctgggattacaggtgtgagccactgcttctggttgacactagtagcttctaaaaataaaatttacaacatatgagagcaacaaaatataaggatggggcacccttaccacttggaggctgaaagtatcattaacaaaacctaggaagtgtaatggatagtaattattattttctagatatctccaactattaaaaaatatatttaggatttagtatagtcatgatgtcataataactaatatatactgagtatttactatatgtgctttgtactgtacatgttttgttttatttcttcaacatttatataagaaaagtggtggtgactgttgttattttttatgggtgaagaaacaaagaaacagagcatgcaactagtgagtggtaaagccagaattccaagttatgccatctgtacattgctatactgcccccaaaatgcagaatgtgaacacattactcatttctatttgttttcctgaattttgtgtttgacttctcttaaaaagactgaatctatttttaatttattggtattaaaatacatgcatagaaatgagatatcagaatacatatataaatataatatcctgggaatatatagtactagttgggtttgcatgttaccatgtgagttatctgatattttttacatgttctgattattttctgttctataacaaaagcatggaaaatgctgagttacttttcaaagtgtaggaatccactgtgcaatgtatgggactctcctcgggccctcctccaccttccctcctctggcagtcactctgccttctgtagttactgtctacccttcctgatatccctccctgggcctcagcactgagcttgctgaagaaattgtggcaggtttgtgatagaactgggaatgtgcttcatttttacctgattgaagacaatttgaagtcattagtgtctgtggaattttaaactatagtcctgaaagaaatttaatttgaggtctagagctgatagcattgataatcaaactgaaaaacatcaggaactgttaaaaatcttgaaagtgtgatgattaggtttcttctcttataccatttttcatgtaactgggcattatagttacaaaggtaatgatttgagagataaaatgctaatacctcaaactgcatggattttatgaaataaacttattaggtacctaagaaccattcagggcacccgaaggtaggttttgtacccttagttttaaaatgcacccttgccaatatgtaaaatcctactgaaaatatgaccagttagaataatattattcttataaaagcaagatgttcaggcaaagggagagccttgaaaataggaagaaataaagatgtagtagaattttaaattacttttctttttttcttgagcaacctggacaatctatttaaactaagcaggcagtttgatgtgaaatgtcttctgctagggaacaaaatgatcaactcccccagaaaatagaaccttcaattttagaaatactaaactatttagagaaaattactttgcttgatggcatggtagttctcaagtcactgagaagttaagtatcaccaactatattatctactcattatttctacatttaaaagtaagttgtttgcacaaggtaaattttgtctcttgcatacagaatgaaataaaatagaaaattaagatgattgtcttcaataatctatgtttcggggtatcaaaagataggaatgagatttgggactgcaaactggggaactatcctaaaatctgtatgcagaacaagagatagatgtcagggtccctgccttttcccatggtagtccggacaaattgccctttcctgcagtggcaggagacactggagttagaaggtatattatgtggaaaaggtgaaccatgtagggcctagatttggaaagatcaagcctagcagagactggggagatgccatagtgaaaacagagggctctgtatactgagtgatgatgctctccagttctcttgtgtagctcagtttcagcactgtgacagctgggtcccatatacacatactaccctgtcttggtattcagacaggaatttggaagatttttggccaaagaaacgaaatagagttaaaaatctaaaatccagacctttgggtgtttcccagctcagtcttcaggttcttgtcaaatgatcagactcagctgggcgtgttgactcgtgcctgtaatccctgcactttgggaggccgaagtgggcggatcatgaggtcaggagttcaagaccagcctggaacatagtgaaaccccatctctactaaaaatacaaaaaattagctgggcgtggttgtgggtgcctgtaatcctagctactcgggaggctgaggcaggagaatcacttgaaccctggaggtggaggttgcaggcagccgagatcacaccactgcacaccagcccgggtgacagtgtgagatttcatcttaaaaaaaaaaaaaagatcagactcctacccagtggacctattttggtgctcacacacacagagtttccagtcaattgtggatgcatccttcttaagtaacaaacaacaaagagtaaccatacatttgaggaaacccttgaactaaaaaaaaaaaaaaaaaaaaaaaaaagaagaaaccattggagtgagcagacaccttaaaaaaacttttatttacatcttcaaaattaagagaaaacttaagttcattggaagtaagctcaatgttttagaaaacagtcaaaataaaaaggagctcttataagttaaatattatagaagacttgggaaataaagtttagcaaatcttccaaaaagtcagagatggataatatgagagaagctatatggaagctagactgttgacccaggggatacagcattcaagtagcaggaattccagaaagagaaaaccaagggcagcaattatcaaagaaatgatacagaaatttctcagaaccgaaggacatgtggctccaaattgaagatacttctgaaaggcaaggacaatataaaaaacacattatcacgaaattttgcagtatatagagaatacagaaagaatttgaaggtttctagggagaaaaaaatcaggcaacatacaaagaattagaaatggtattgaatggaaattagaagacaatgaatcaatgtattaatatttgagaggcaaaataatttctcacctagaattctttacccaataaccaaactatgaatattgcaataatattcatagccaaactatgaattactaggtaaaataaaatattttcatagatgtgggactttagagtgttacatcctgtgtatgtttagaaaaagctgaaggatgagctagtaaatcaaggaagagggagatatagaagccaggaaaggggagcaaagagaagtcccaggactacagtaattcaacaggcttagtagagcaagcagtatcaattagaagagcgtggagggctcagaagaaaaggctccagagaaaattaacaggtagattatgtggttgtcttaattcaattaatgcagctataggttgagtatcccttattcaaaatgcttgggaccggaagtgttttgaatttcagattttttcagattttggaatatttgcataaacatcatgagatatattcaggatggaacccaagtgtaaacacaaaatttatttatgttttatatatatcttatacacaaagcctgaaggtaattttatgtaatattttaaattttgtgcatgaagcaaagtttcgactgcattttgactataatctgcattttagtggaaacatgctgactctcagaaagtttcagattttggaggtttctgaatttcagattttaagattagagatgctcaacgtgtatagtagaataccacagagattggttaacttataaagaagatatatttatttgtctcatggttctaaaagttgggcagtccaaaatcgaggggctgcatctggtgagggccttctcattgcataataacatggcaggagatatcacaaagcgaggaagcagtgggagagacagagagagagtagtggatgaactcattctttttatcaggaacctactccaaagatagctaaccactcctatgataaggtcattaatccactcatgagggcagagcccccgtgacctaatcactttttaaggattctacctttcaatactcttataacaatacttaaatttcaacatgggttttaaggggacattcaaaccatagcaatgttgttgaaaaatgtatttttgggaggtatatttggaaagaatctgtgatagagacagagaacttgaacaaacaaaaacatgagcaattttattttggagggcagatattctttgaatgaacaccctgccaaaactaggccagatgacagcttggctttgtagaggttacagaaagacaagagtgaggaacagcactataaaggagtgagcacaggtggcaggaagaagatggttttccttccttatgtttaaaattgataagaaattgtcatataattgtttagaaatacacaagtagaaataaaaaataggtacagtgtttgaaagggaacttggagtagaatgctggtctgatggaatactgctgctttttcattattataatgtgaatggacttttaaaactatattaatgcatagctttgataaaaatgcatacactcaatactaattgtgataagtgccacaaaaataggaatactgtaatgagaataatggagtaggtagtacaagatgcaggacaacattctttagatggtatggtcagagaagacccctctaaaccttaacaatgagaaggaatattgtgttgatagggtatgagtgtttccagacaagagtgcagtctgtgagaagaccctaagcgcaaaaggagcttgagaaactcctggatctgaaagaaggctggagactagtgatgaaggtagatgtaagagataaggttgaagagaggtaggcatgagtcagattatactaggtcctagtagttcatgagttgttataacttttcttttaacgcaaggtaccatctgcataaaatgcctttagttcctcttttatactagatggaaacctaacatgtcctccatcaacaaacttttgctgaatgcctgtcatgtgcgttttaaatgaatattaagtttgcattacaggtggatgtttatacaaagttacgtgggtctatatgtgaatcagaggattttcggatacattaattattgactagctttgaaagagaaccaatctaaacagaatttttcttttaagttctattgactaaaatctctgatgtaacttgccaggagattttacacctatgtatgatttgaggggtcattaaagattattttaagattgaattttggccttttattattacagttattatggagtttctgtatgtttaaggccagcaaagtctagggagattgaattctggttttgaaaaatatcaaccacaccggtggtatcaactacttgggaggctgaggcacaggcctcccttgaacccaggaggcggaggttgcaggcagctgggatggtgccatgcactccagcctgggcaagagagagaagctctgtctcaaaaaaaaaaaaaaagttactagcatgttaaatagactgcattgctttgggcttgcctgtatttagcaaataaagagaatgagaaatgttctttctatgcaaaaaaaaaaatctaccttttaaaagtaaattttactcattattactaattgcttaagaaaatttatcaaaattgtggacgaatgaattaatctcataacaaaaaactatttaaaataacttattgctagaattttctttaaaaagatacttaaaggagatttcatttcatagtatatatagaaaagctaaaataaatgtgtctgtgtatcttatacagggcagtttctccctacaagtctttttccttcctgtccctaagctccccacaactgtctttttacccaatacccactgactcctctgtgtcccatttatttactaggtgcttagtgggtattaggcattgttcattttgctgttgttagttttgtagagcatttgtgtttggacgtattaaaggacctttttctgatttatttttcttaaacaatgtaattagtatagaattaccaacagctcagatctgccactaaattaaatattgagagatacttacttttagcctctgttctcttccaggtatattatccaaattttctgtgtcattgttttttacaggtatgctggagcaatggaaagattgcaagcagagaccgaacttattaatagggtaaatagtacttaccttgtgaggcacaggaccaaagagtcaggagaatatgcaattagcattaagtaagtaggacaagtacttttacagaaatagatttcctgttttcataattgcatagaccatctgacatgtataacactgaaggtgaaaaccaaagttctaattgaaggagaaataatgcatctatccagacagttcattaatacttgaaaatatatctttgaaaaacagtaaaaagtgttataggttgctaattggcatattagatttctttcataatattgtgttttggtggtttgatgtgtgtatatttctagtaaatactaacagtataaatttctagatttttgtcttatttttctgtattctcaaactgaacttaataaattgtgcataatgaatagtcaaatccaacctcccttctcacttcaaatattggttgtatcctcaaccaatccagtaaatatattttgttaattagctgtcaccagtgtattggcataggtatatatttttgtctgcagaattaattcctaaaatgttattggggcatgccctctggtaattattgatttctactgattaaaaacacatttatattcataagttattcattgcccacaggtacaataatgaagcaaagcacatcaagattttaacaagagatggcttttttcacattgcagaaaatagaaaatttaaaagtttaatggtaagcattgattatttcttttcaatctgggatccttatttttcttttgttagaaaggtcattttaattctatagtttcttggaaattttgctcactgaaaagttatttaaagataatcatattctaattttgcaacaaaatcctgaaaattctaatttataaatctctaagttttatattgctcgaatcgtaatcttcattgtaaattgtttgcaggtttagatagagttttggtttgtgtttaaatgatacagcagattttaaatatacctttctttcctctttttttcttcctttgcctctatgtcctgattcaggcagaggacagtattttaaattataacacaaaaagttgtaattagtaaaatatgtctaacatttaggttcattttttataaaatgcaatataaagtcaaattgaaaagatttttgtattttttgctattttaagtgatctctaccatggttctcattcattaccttagataattatgcattaacaaggtaacatttttgccacttaacagttgatatttcataggaattgtatatttaaatggaaatagtatattgtcaaatcacatcaaatgaataaggattattcccagtttaaaaaaaatagaacttattcatacttttgttagcatataagaatattttgtgtatgtcatttaaacaatgtgtatatatcatcatgtatgcgttgctaacagtaaactctaaattcacatttccttaagtggtctcaagtatgtttctcaagtttggtagtttctgagataatgaagagtttggatataggacataagatgcatttgtactgctaagtaccttgagtaacattgggaaggaccactcattgaatgaaccatcaatcaaatgatacatactgcatccttccagaaaacatctcaaagcactttgcagatgttaacattaaagttaaactgagtgtaagggagccttacaaaataggccagcttgaatgccttatccaaaaatgtagaactgcttcaaggcaggtgtcagtgttttaaagaaattgaagcatcttgagttgaaagaaaaataagaaaatctctatggatgtaaagatcattcccagttcaaaagctaaggatgggcagcaaggtcatgtcctggaaaatgtaaactctgtcaaatttgtaaccaagatccaggcatcctccctgctggaagtaacttacattctgttgaaacaagcaggctgagcacagagagaattggaccagaggaggttcttcataaaatgaaaacttggagggaggtggcaagtggatgcacaaataatgaatgacagacacagctgagacatgataaaagcacgcacaggggctctccacatctctgcaagacgtaccagcttgagctttcacctgcagaacttccttggatggtaatgaggctgctccacagtgttatagttactatgggacttaaaaaactgctgcagagccaaagataactgccagccttgcagactttgaaagtagcaaaagtaactcccatcagaggagacaagcaaagaagatgaaaggaatcgtcactgaaaagggccaatgaatttagctttgtgtcacctgggttcagctcaaggcagttcttcagaagccaaggttagatgtgaaaagccagtaataccacagtgacctggattggtagacatagatacatgagttcctatctgcatgtaaaagctgtgattatagtgaaagcaatagagacccagcattaaaaaaaaattgtgccagagagccttaaaagtttctacaatgatattctctggaaaaataactaaaagtacttgtcacaggactaaagtaagcttttcttatatgttatgtataaaatctcagcaatgccactattagagacacgtgcatatgtgttttcgtctccatatctgggcatcttttgtaaggaagcacgtatcacagcgtgttaaagggaagggactaagaattttagcaaagcaaaatgaaactaacaaacattagcaaaggatgtaattatgaaaagaaaaacaaggagctggaaaaaaaatctcaatatcagaaaagtgcttttatcaagtttagtaaataactataaaaattgctgaagaggcagctgaactaatctgaagctacccctccattttgtttctgttcatttgttgagcaaatttatattgagtccttacaatgtgaaatcactttctggagaactcaaaaggacttaaccattctaaaaagaagcttaagaatcagtaaatacgtctacaccaagaacctcaccatagagcagtccttggaacctaggctgggaaatgccacatggatacttggtcagaaggaatggctcatgttttagcaacctgaacttctggaaggaggtagaagatgattaattggtgtgaaggtttctcaaaatcaagatcatacagacttcatggagttaccttttatcatgttggagtcaaataacacacttgtctattataagtaaggagtgatctgtggatttgagttgtttcttaagaatagttcagtatcctcttgttattggtattagtttactcttctatctgtgaaacacaatagggcctggaattaaatttaaatctggaaagtgtgtaaaacataagcaaactccagagcttcttttaaattaactggtttctcagtgagaagattggccttaggtggttttgacctaacctttttcccttgagtttcaatagcttggttaatcagaatctttgtctttcttagtcattaaattcaaatcctaaatgaatttctgtatccagattacaaggcattaattttgttctaattttcatgtatgcgagacagtccatgtccaaatgctgtttataaaccatctccattgcctgtttccttggtaattggaatgactggctctcactcattatttttgagagacttgaattgttgacactgctgtgtcagtgtgagataaggaaagcttagcgatttcttttgtttagagtcttcttatttacttgttgtacctgaaggtcaatgactgttaaggcaggggtggattagactaaaatacagaaagcataaaggcaaattggaaaagatccatggtgacactatttagttctacccagttagaaacatgtaggaagatttaccctcgtaagactgtaaaaatggaactaaaatatcttccatgcttagtgaagtgataaagagtgttttgcagcttactaagtaagccgcatgaccctaggccttggaaaactcattttttcttccataaaatttgggggtgggcgagtattaaataatcaccaaatcatttttcagtatgataattctatggtttctagccaaattcacataaattgtaattcatagcaaaaatcataaaattcatattacctataacaaaattacgttgaagttcaaagctatggcttataattcctttcaagtttgttttcacatttgctaaagaaaataacacattttactcaatttaagtaataagactaggagaaacttcggtatcgtttgtatcagtgacattatgtatacgtgtgtgtgtgtgtgtgtgtgtattccagagacctcacaaaattttgctttatattttaaaaaaatgaatagcaatattggtcactaagtagaatttaattctataccttgtctgcgcaaaacatgttaaaattcaccaaaatacaaatgcatattctgatcattgaaaccattttggagatacaaacttctacatggtcttttgtttctttttctctttgcttttaaaggtcggtctgattacaaatttcttgcttcaacaaggacccacattatctgggcccaaggaagaaaggaagaaatacatatttttcaagttatagatataatatttggaagaccctaacattttaagtctaagaaaacaaagttcctagtacatcatgaacacatagcaaaaactatttcacttttgcctccctgttttttgtgtgtgtgttttttggtgttttgttttgttttgttttgagacagagtttcgttcttgttgcccaggctggagtacagtggcaaagtctcggctcactgcaacctccacctcccaggttcaagtgattgtcctgcctcagcctcccaagtagctgggatcacaggcacctgccaccacacctggctaacttttttgtatttttggtagagacagggtttcaccatgttggccacgttggtctcaaactcctggcctcaggtgatccgcctgcctcagcctctcaaagtgctgggattacaggcatgaaccaccatgcctggctcttgtttttgtatttacatttgctaggcactatttgctaatagtatgatacagttaagagcacaaactttggataaaggcgctagctatgtgactttgcctaagttcactcacctcactgatatttgagcttcaatgggaataaggcccatttcataatgttcttgagtgaaagttataaggagccatgtaaagggcctggcacatgggataatggggtagctgttacagtttttcacatgtattaggtactttatatattctttgttatcatctgtgaaatggtttattagccccattttataggtgagattgaaaaattgccatttcccttatccaatgctttagccaaactatgctgcttttagcttatgaaaggtggtctttgtttatcacctttatgtctgtttccagcctgcctgctctacctaaaatgatctttccctggttcctggctattgtaattttactagttcttcagtttaagccaagctacttgtattacaaaactttctgtcacccttcccattggatacacaaaacaaagttctctctcctgcctttgaactttcccttccaagatgagaattcctcaatggcaggaggcttatctttataatctctgtgacctctgaagctcctggtacagtgcattccacaacatactcaagttttgtcataaataataaatcattgatgattctctttttcttctttcagctgatttttggactcattgatttgtctggggaactttgaacataaccactgaacagagatattaagttgatggcagtgggatttttagaagaaacaagtggtttttttttctgtttttttttttttattttttatttttaaaaaggcgctccaatagaaacattgaataattaagttaaaagtgatttttcgtttattttcatttcagatatttataagaaattttatatctacaggactcatttgatgataagatacatttttattgtgaattattattcagtttcagtttacagtagagagattcagatttctgcagaatctatgaaaccaacctgcgaaattttctgaaacgatagtctgaaggatggcatgtggttattacattaggtttagatgtatttaagacaaattatttataagagaaaattggaaagaattacattgacctctgtgagtagcagatatgcggagctatgacaggtactatacttcatcagaaactaaaaacagtctcaagtaccatttgtgctttatcaacttttgtttaccacgaaaaagcataagtttgtttttctgccattttgaaagaaaataagtgcaggaaagtagaaattgctgtatattcagcaagcagctgttccttttattttggtttagaaaggcaagtatttcataaataagaacaataattactactctgaaactgaggtttagtattgtttcttttcatttgctacatctgactgaagacaggatgttctccatctgtgaataacaatagggggtaactcatattattaatggcctgagtaacaaggacagctattaggtaggtgtcatgtacatccagacagcagggagagattatcatttgcttaatcttccatatacctatggaaaatttagcattaaattggtcatccttattgtatttatgtgctcaggagttcatgtgtttgagaacaaaagtatccttatcaaaaatatgttggattcttttttccaaaggaacttgtggagtactacaagcatcattctctcaaggaagggttcagaaccttagatacaactctgcagtttccatacaaggagccagaacattcagctggacagaggggtaatagagcaggcaacagctgtaagtattgtaattgagaatacaatttgctgtcacttaaaaattaggggcacaataacattaaacatcttccttccaaattttaaaatataaccaatggatgcgctaatgcatgagcaaggacttcttttctggagttaagcagagtcagatggaccaacaggcttgtgaacatgtctaattatagatctttatggcaaattaaaaattatgtttatgtccaaaaatccagcagaaacgtaaaagatatgctaatatttacatttcatacttttcattgacttttatattaactaaactctttttaacttacatgtaatgtgtgaggtcataattctgtttgagtaatagtatttaagcagggctggtacacagctctccagttagcctagtatctcaaatctgcttatggtctatttcaatgactactttaagaattttgacattactaatgtgtttttttggatgctagtatttctaaaaccatacattggccactttctttcagaatgagctgtgtgctacaactaatcacaaaagattagcatgcaaacaaaagcatgttatggttggactgtgagtctaagtcgaaaaccttttctctcatcgtttaatgttacataatcttcctggagatagagcatgtaacaaaaaaattgaaaaatgtcatcaagaaggtgtgattttattttcttaatctgatatcactttattttttttaaataagtgttttggggaagaagtgaatacaatttcattactcttagaatctttagcctaagcaacactgggatatctagaggtatttgaaaacagaatttgcgtcggtttaatataactttatatttttccttgaaagcagaaactgaaaggggaacaggtaatgctctgggtttcaacaacatcagtgaagttttatacatttcaattcaagtaaacaaacaatctgtcacatcaactgacatattttttatttaagtaacttaatatatgttttcctcacagtgatcaatgatgtatgcctaagctcgtgcaatgaaagtagagcgaactttatgttaaaactttaaacacctattagattttatggtgttattttttagcccaagattacctgattattttagattctcaaataggcataatttttgctcattcaaaaatggaagttttctccaaaaaaacaattttcctaccaatatcttaaaactctgttgaagctatgacatttcccccagcatgaaacatgtaattttcgaagctctgtttctttgccttcccagcagcaagagataataaaagttgccagggaggtcagttagatgaaaaatcctgtttgagttgttcacttagctctagagagcctaggagggagaagtggggcagacagggagaacagatgtcccatattaggtaggaaggtcactaaccctcatatttcactctgtggttcactcccagccaattccttagtgtttagtacatggaggtactcagagaatgtagcccggcaatgaatgaagttgtctaacttaaaattatgtctcatgtttaatgaagtatttaatgctcaacttgtttgacaactaagaagggaattacaggactttttcttaaaaaaaagcatagccagtagaatgtctttgaatatccatgctagccccagataaatttttcagcaaataaactcatgagttcaaacttccctatccagtctttttaagagattctgacaacttgaatcaagccactaaaactttttttttgtaattgtgaagggaaagcaaacaattcattgaaaattttatatttgttatcgtttggttttgttcatcaattattcattcattcgttaaacagatatatattaaacacctaacacatacaaggcactgttctggttctgggatatagcaattaagaagacaaagttcctgcctttatggagtttacatttcaatggggaaactcaggcaagtctggtttggaggagtttcatatttttatatagagtggtcaggtaagatctccctcgtaaagcaactcaaaaggagagaaggggtgtaggttggtaatgattgcacagtggttaacactccaagattagtcattcgttactgcaaagaaggattacaatcttagatcaaatttgtgataccattccagtgttttatttactttatactaactttgtataaagttagaggaagactaagatggttctgaggactaaatgaggtgttctatataaagcacttagcatagtgctcttacatggtaaacagtaaaagttactgctgactctacaacttctacttcctctactactgctgctacttctaactcttattctaacacagtactttcctatatttctaaggcttgaatacatttactaattatgactcatagcaatgtacatctttgcctttatgattttttaaatataacttgcttatttttataccaagtcttgataaaagctcacccttaaagaaagactgcttctatttttatgcattttatacatcccaggaagtggtaaggaggaaatgctgcatgtttgtatagaaagattgtgcaagatgtcttcatattgcttacctttggttcatagctttaggtatgctgctatcatctaaaaataacatttgccaagcattattaccttgggatactgggttggacagaaatggcatctccattacttctaaaagtccttggaggatacagagcaggcaaggtaaagcttggaaccattctgtgttctgagtagaggttgagaatagaacttcaactcctgaaacctgctgtttattattgttattatttttaaataatctagtcaccttggaaaagaaagccccagggcactgtagtggccacttacttttgggctactctaggttagaatgttcgtagaatgtttaccaattattttttcaagtatgtacaatgtgataagattatgacaggactatcttatgcaaattcaaagtaacatctaaaaagatattgattagaattaagcaagtgtccaaagtattgggcaaggagcataacattttaaagttaggggcccattgtaggctgtctctcagcctctctcccagagtgatgggattttatctttgtctttggaatgacttaagagcatttctaagggagaagaaaagagagaaagaaaaagaacaaagagagaactcaggcatagcagggagctcttgggcttcctctagaaacttcagtgactccatgaaagatgttctatggatctttgtaaaaatcccattattttccaaaatggtcatctcaaacctgccttagattgctttaggtttacctgtagggcttgtatatttgaagggcattaaattgacttttgcatttcttgctctacaatgaacacataattattttgaggtctgccagagtagctgtctgaccttaggcgagtcacttagcctgtctggaccttagctttctcatctgatgaatgaggaatgaaattagagattttataatgttcttttaaaaatagcatcttaggttttttcctttgtttgcatgagagaagcaggtaaggtaatgttaacagattggtgcattaggaaaagttgtatgtttagctattttgtgacccataagcagaccttaaatattttgccaagtttttatttgtagagaattagttgggccacagagtagagttgggtaatttttttaaatggctatcactatatttatataatatccaagtatcttctgtaagaacttattaattacaaaagggtaatagtaataaccaagtgattgaagttaacatccctaataatgggacaaataaatatcatgtacctcctaatataatgctccaagcaggacaaaccaacactttggtggtattattgtccccaaaaagcataagtggaatctaatcatgaggaaacatcagacaatcccaaactaaaagacattctgcaaaataattggtctatactctaaaaccttcagtgtcattaaagaaaaagtctgaggaactgtttcagattaaaggagaccaagagatgtgacaactacatataacatgtggtcttggattgaatcctagaacaggggttgggaagatacatacacacacacacacacacacacgtatgtatatatatgtgtgtgtgtatagtaacatattttgtatatgttataaaatatgtgtgtatatatgttgctataaaagatgtgatacaattggcaaattttgaataaattctcttgattaaaaaatagtaccgcatcaatgcaattttctgcttttgataattgtactgtggttatataagagaagagaatacctttgtttttcaggaacgtgtgctgagtatttagcaataaggggcattatgtctgcaatttattctcaagtggctcaggaaaaatacatagattgataaagcaaacatcataaaatgttaacatttggggagtctgaatgaaaaatatgtgggaattccttttgctctccttgctactttaagtctgaaatatttcagaatagaagttttcagttgtggagatgatcccatttgctggctatatctgaagaattgggaggtagtgacagtgtccttcttttgcctgcttcagacatagaagcgtctggtccattgatttcaggacgtgtggaacactagcatgtactgaacagatcatatttgaagccatccgttccttacctgtgacctcattggatttgcttcattcattcattcattcatttattcattcattcattcattcatccctttatcctgaaaatattttcagtacttagtatgtgctaggccttgtgctagatacttgaattataatagtgaataagatacacaatctggtgaacaagaacagacaaaaacaaacaccttcaataatcacaaattttgataatccttatgaagctgaagcataagtgcaaggaaatgggagcagggccatttagccttcagggtcagagaagggctttttgaagaagtgacagtcaggctaaacttaaaggatctacaagagctgacagggtgtggggtggtggccaatagggaacctgcatagcaaagaggtcgtttgtgtgaaggttcataagcattagagaacttcatatttttaaggaactgaaaaaggaccaatgtgttgtgagtatagtaagtggattctgatatttgcactaggaaagtattgaagttttacagacagaaaatggcatgaactaatttacattgtcttaaaagaccactgactgttcctgaggagtggcctagagggaggcatgcacagagggaagatgagttaggaggctattgcagatgtccgtgagagggataagcatgctttgaacatgagttgcatagtgacagcagagaaggatagtggcaggtttgcgtatatcttagaggttgagttgattggataaaggatttgaaatcaaattagtacaagtatggtacataagtatttgctttggacaactggcaagtgataaaaccattaacaatccaggaaacagaagagatagaacagatttaagagaaaagagaatatattcagttttgcacagtgtttaggtacctgcggatattcaatggttcaggatgcagctggcactgaggagagtggtctggattgaaggtagaattttatgaatcattaatactccatttcatagttcacatagaatatagtgatgtgagaattataggcatttgtatataggcttaatttcttctggtgcattgtttgctggagccctagaagccaggaccctttgcttgtcattctcaattgtacttttgcacatgccttgcatgaaatagcctcagaaggggctaaataagagaagtcagagtctaaggttcacaggagacacagcagatattagagtgctaagttgaaactggaaaagcatgggaatatgggtgagtttgaaaacaaagtgtagatcagcatgttcctttcagtgtggtgacaaatagtgtagcaattcttcaaagattgacaaaggctacttttgtcattggagccataagtttgaccttgcaggaagaagtagaagccagaacagagcctaggctgtctctccctgggtgtggtctctttcctgtcacccactgtccccattattctattcaccatccaacaacatgcttatccttcatttttagtcagtattttgggtagaaacagaaacttggataatttgtgtcgtatttatttaactcagtagaacataaagtagcattcttattcctgataattccttaaacatcctaataattccttaactactatttattagttatattacaatagaatagagacaatatttattatctccttcgtacaggttcctaaccatccacttaacttagtttctcccttgcccttttaattcagcattcccatattcacctgcctttattttctgattttattgtatcctcagtttttttgtcatcttttcctcggtcattttgcaattgggtttgatatgatctaattttattctggtaatttaaatatttgttttaatctcattatattggtttcctagtactgctataaaattatcacgaaccaagtggcttaaaacaacagaagtttactctctcacccttctggaggccagaagttgaaaaccaaagtgttagcagggctaattcttcctggaggctctgagggagaatccctcccatgcccctctcccagtttctactggcaatccttggcatggcttggtttatagatgcaccgctccagtctctgctggtcttcacgtcaccttctgtgtgtatcattgtcccttcttttctcttatggacacctgtcattggatttagggcccacccaaatacagcttgatctcattatgagatccttaactgaattacatctgcaaagacccctgtttcaaataaagtcacattcacaggttcacaggtcctgggtgggcatatctttttgaagggccaccattcgacccactgcagttccactgtattaattttaaacttttctctaaaattttccatccttattctaatttttctttttgtcattttgtaacttggagttataagaggactttacattattacagcagtcaggcagtcagtgaatgagatttatacaagaaaaacactactttaatacaaaaaaaaagtgttttcaatgaattgtattgcctttccatggtgaaatgccttatctttctgagagactgcacttctagccaatgcaggctcctaaacaatacttgaatgaccatttgtctgaaacattgtattaaatattttatatggaataagagaacctaagaattctgaaattcaataatttgatgattaacaggacactcttacttttcaaaccccttttacaaatatcagatcaatatctccaatggagtattccaggaatctctagccctgtgagaagtaccatgaaaagatttcttttgtcaaacagatatataagaaatgctgctagtatgatgtattcccttctaggaaagtgacagtttatctagagttttccccagtttatttcatcatgcaacactgtctcatagtgtttaatgctcatgttaggaggcttaaaagagttagtaggtgtgaaatactgagaatagcatctcacatgtgggaagtgctatgtgttttgctcctgctattactactgctgctcctgctaccacttccaatactggtacccagtgtgaagtgttacattagcctcatttgacaattttaagtatatttataaagtccttctccttttccctgatactttggtttcctacttctatttcctggatacacactattccggtatacacactattctatggactaagttagttataacatattgctgacatttttatattcttctctcttcatttatgatgtccacataatttacagttcttgaacaactgatcaactgcaattgcacatcttcattagtaagtgatgctgggcttcccttttttatttagttacttcaggatctttaccagctactctaaagcatttttattctgagcctgatggctttaaaagttagcaaccagtatccaggatcccttcagaatatggcttgcaggtgtaaattctacagattcagataacctcattcagtgctatcttttaaatgtttcaaggctcagagcagtacttatgatcttagaatttctcatcttttatactgttcattaatacttttatagtgtctcatataacctcatgttctaaattgaaaactggtctcggccaggcagagtggctcatgcctgtaatccccagcactttgagaggctgaagcaggtggatcatttgaggttaggagtttgaaacctgcctggccaacgtggtgaaaccccgtctctactaagaatacaaaaaattagcccggtgtggtggcacgcatctgtaatcccagctactcgggaggccgaggcagaagaattgcttgaacccaggaagtggaggttgtagtgagccaagatggtgccactgcactccagcatgggcaacagagggagactcaatataaaaaataactacatacatagatacatgcatacatacatacatacaaacatacatacataactggtctcaatgcagttaatttaccatagtgctttcatataacagccctgatccaagaatttggttttactagtctcttgcttgaaaaacaaacaaattcatctaaatggggagaaattcccagtttttcttcctaaaaatttaaccaggctcctagttatgaggatcaatgctgatatctcttttttcctgatatatgactgatatttgattttccctgctgaatcccaaatctgcataaggtagcaggttttaactctgcagctctcttgctcttaataacattaataagctgactacatattcggctagggtttcctttcattaagttatactttcattcattgcttcgtgcattcaacatttgttgagcctctgcttgcattaaatactatatcatactcacgtctcaagtgttacatacaatacagcttaacatctaaacaataggtaggaatgccagagaaactcttcttgtatctaggcacttcaaacttaccatccccattagccctaatacaagtttttttaaacgttctgtaacactcctgagaagtcatcatcaggctttgcttgaacactcaagggactttatgttcaataccacacaaaacaccctattttctgaacaaattaagtttttttcttttattgatctagaaatttgatgtactatagctatttactgtgattagttcaaaataaatatatattcttcctaccaagataaccccaaatatactataaaaataatgcattgtacattcaaaataaatatactatatactctccctctcatggtaacttttcatctggtatgttctttccccttccccatgcttccttcctacctcttcattccttccttttctttttcaaaataattaatcaattcctcatcatgtaaatggttgtcaatttcccaccatcttcaccaccctctgatagatgcactccaatttgtcagaccgggcacaaaaatttcaatattgcctgactgattggctcagatttttctttattcaaaactcattcttcaacagttaatttccacccttccctttctccttcctcctcaaagggtacagttctacatatttcagtcgaatccaagcacttctttcctcatttactgtttagttgttgcatcttcaccattaacctcctccatagttccccacattcattcattcattattcattaatgcattcattcaacagatcttaattgagagcctacttcagggcaggcactgttaaaatacagcagtgaatagcatggataaaattccctactctaatggagatgccacttgctagtagggaaggtagctaatggatttagaaaaataattaagtgtattatgttagacgttactgagcgctctgggaaaaaaaaaaaaaaaaaactatgccaagggagtggtactcatgagcgctgagggatggcttacaatttttaactgggctggttgggtgatgaaaaacaaaactatagtctcattttccctctttctggtagcgtagcagaaagctggttcatcacttctgagttagttcaatggtagagcaggctgacaccagccactggctctagaagcacttctttctaacaggccacttgtgtgaccagggagcttctgctattataagtttgcataaatatcctgtcaatacatagagcaggatgctgaaactgtaactacagtgtgtgtagagcatttgtgcctcacctcagcagtaggacaatgggagtttgggagattgcatgcacgctacctacttctctgattgtgtgttgttcccacaataagctctgtttctgtcaccatcacatggcactagtggtgtggatccatgacttttataggacatcacagcaggtttcattgtgaaggttgcatttgaatcaagactctcaaggaggtgaaagagagaactgtcagtgctaagggaggggtatgtctgactgggcaatgtggccagagcagaaggaccaagaggaagagtagctggagatgaggttcaaggggtaagtgaggccagatcacttaaggccctaaaggactttagcttttacccttgaagaaacaggaaaccattggagggatgtgggcaaaggagaaacatggtctgtctttaaagttttaataggattattctagtttctgtattataataaaaaaaaccatgaaaatagatgacagagtaggcacaggaagaccagttaggcccatacagcaatcaaggtaagagatgatagtggcctggaacagcacgtagccatataggtgactatatttatattttgagggtgatccaaaaggatattatgacacatcagatgtgatgtataatagtaatagaagacttaagaataattctaaggtttttgctctgagcaactgggagtttggaaggttttgttttgtgttgagggctccaatagagcctaaagtctaatcatagcattctcaatccaaaatcaatcatttccatatctctacataatttctgtctgtgtctatctcttcactaatttctaagctcctgtgatgtcagaggctgtacctattcattatatctcctatgatatcttagcagtctttggcacattagcaatataatacatgtctgccaaatattttttaaatatagatttagaattaacatcttgataagccatatgcatataaataatctgaaatccctaggcagttttccatagcaataagaaagaccttatacttagtttgttttcttgttaatggctttatatgtttatactctgtagcattgaatactaagtagtagtttattttttacaataatcctagacataagttttccttgttacagctttggactttgggttaacagaaatttgtctacttaccagatgtcagcattcaattaaatgaaattaatctaaattattcctagttttttttcagtgacaatatataaaatatacaataagcttttttcttgtaaatttgtttgagttcattgtagattctggatattagccctttgtcagatgagtaggttgtgaaaattttctcccattttgtgggttgcctgttcactctgatggtagtttcttttgccgtgcagaagctctttagtttaattaggtcccatttgtcaattttggcttttgttgccattgctttggtgttttagacatgaagtccttgcccatgcctatgtcctgaatggtaatgcctaggttttcttctagggcttttatggttttaggtctaatgtttaagtctttaatccatcttgaattgattcttgtataaggtgtaaggaagggatccagtttcagctttctacatatggctagccagttttcccagcaccatttattaaatagggaatcctttccccattgcttgttttttgtcaggtttgtcaaagatcagatagttgtagatatgcggtgttatttctgagggctctgttctgttcctttgatctatatctctgttttggtaccagtaccatgctgttttggttactgtagccttgtagtatagtttgaagtcaggtagcatgatgcctccagctttgttcttttggcttaggattgacttggcgatgcgggctcttttttggttccatatgaactttaaagtagttttttccaattctgtgaagaaagtcattggtagcttgatggggatggcatttgaatctataaattaccttgggcagtatggccattttcgcgatattgattcttcctacccatgaacatggaatgttcttccatttgtttgtatcctcttttatttcattgagcagtggtttgtagttctccttgaagaggtccttcacatcccttgtaagttggattcctaggtattttattctctttgaagcaattgtgaatgggagttcactcatgatttggctctctgtctgttattggtatataagaatgcttgtgatttttgtacattgattttgtatcctgagactttgctgaagttgcttatcagcttaaggagattttgggctgagacagtggggttttctagatatacaatcatgtcatctgcaaacagggacaatttgacttcctcttttcctaactgaataccctttatttccttctcctgcctaattgccctggccagaacttccaacactatgttgaataggagtggtgagagagggcatccttgtcttgtgccagtttgcaaagggaatgcttccagttttttcgcattcagtatgatcttggctgtgggtttgtcacagatagctcttactcaaacaaccccatcaaaaagtgggcaaaggacatgaacagacacttctcaaaagaagacatttatgcagccaaaaaacacatgaaaaaatgctcaccatcactggccatcagagaaatgcaaatcaaaaccacagtgagataccatctcacaccagttagaatgggaatcattaaaaagtcaggaaacaccaggtgctggagaggatgtggagaaataggaacacttttacgctgttggtgggactgtaaactagttcaaccattgtggaagtcagtgtggcaattcctcagggatctagaactagaaataccatttgacccagccatcccattactgggtatatacccaaaggactataaatcatgctgctataaagacacatgcacacgtatgtttattgcatcactattcacaatagcaaagacttggaaccaacccaaatgtccaacaatgatagactggattaagaaaatgtggcagatattcaccatggaatactatgcagccataaaaaatgatgagttcatgtcctttgtagggacatggatgaaattggaaatcatcattctcagtaaactatcgcgagaacaaaaaaccaaacaccacatattctcactcataggtgggaatcgaacaatgagaacacatggacacaggaaggggaacatcacaccctggggactgttgtggggtggggggaggggggagggatagcattgggagatatacctaatgctagatgacgagttagtgggtgcagcgcaccagcgtggcacatgtatacatatgtaactaacctgcacattgtgcacacgtaccctaaaacttaaagtataataataaaaaatatatatatacaataagcagtaaacaatagggttttaggtcattttgtttgggagagattggggagcagatagttgatactctgtctatgaattttgcagggcatctaaaacgatatgcctgagttctaaaataaaaccagggtaaggatcacaaatttaaattaagcattcattaaattctcagcatgttctctggtgttaggccatctgtagacaatcttggcaaaacgaacctcctagactgctcatcaaagcatcccacttaggagtacagttcttcagcaaaacatctagggccactgctgggcagcaaacgcaagtgatcagtgttgacagtaccattgacccaatcttctcatattcttactaacaactttttgttacctgagtgagaacacatgtgcttgttacaactaaaaactgagtgttaaggaatgtctgtcccagagaatacttagcaagcaacttagggtaatgttctctgatacatgtaaaggataattattagttcaaaaatacttaggatttgataactagtacctgaacgaagagtgtcgattaggttggtttccaatgtgtaaaaatttcaaatattactgaaaactgagtaaattttcatctgctcatgaacattaatagcacgatcaaggcagaacataatactttaaaacaatccttagccttggcaacaaaagtataggcatcaaatatccagtcactagtacttttttatcctaccataaacactgtgttctttttctttttaattggcattcttctgtgttttgtggtgttatcttctcagtcaggtctcagaactgaataataaccactaatgatttgccagtcagttattatggctatgctgataacttctattccaagtttatttatttaacagataacttctatttatattaggtaatgttagtacttcaggttttgcttaacttggaaaacttgataaataatatttgactgtgctcttaatagttcctaattggaaactttaagtcactaaattatgagccactgagtcatttgctaataatgccccatgtatgttagctcagttgagagccaggtgtcatacacatgcaaaataaccagatacctacctaagtgtgatggtctctctaagcaaggtggcctcccttgcctatgctaatatggagttgaaagtgtttgtaaaagggggaaagttatgccgttaaacgaagcatccagtttgcaaatgattacctattgaaaaaggtcgcagtattggtgtaatattatctaagtggatgctaatatgcataaaagagttctctttcaagaagcttccagaacaacatgatgcaggtaggttgtctataatgttaggcagtgaatgaagagtccgggagatgataaccacctcaacgttcccatttaaatgtcactgttactgggccctttttaattctattccaggacgtgtacctaccaataatttttactttagaagtttcttggtgtggtaggaggagtttgatgatgaaaccatgcatccatatatatagaaacaagtggatatattatcagtatggatggaaatatattttacaggttaaatcattctaaaaatatttttatcaaataccttattctgatattgcttacatctgggtttaaatccatactttcctggagaaacatgttatcttttactcttgtctcagtaggtgccaggcattcaaatgctgtttttccagctcaaaggaattaaggacccaaaggcatttaccattgatatataggaagagtggcaacaataagtcacgctacagtgtgtagaaaagtagaaagcatccctaccaatccttaaaatgtttggctgagagctatacactgggtggcaggagaaactgattaaccttttactcctaagaagattcctcaggcatagagtatggttaatgccgtgagacatacagtatttaataggtgttcagcatctcagaaaaaaaaaataatagttattttaggaatatcactgatagatggtggtgctcaggaagcctgcggaatagaacccgaatatatttcgctttctttgcttggtgttttgctggcctttgttggaagtcttatggagcagtttaagtgagcagaagatgagctaaaggaatggaaggaggagacataaggaacttgcagaattaaataccctgccgagatacttgtccattcagcagcttcagttgcttagcactggacctgatcctgtggaggatgcagaagcaatattagaactggcccctgccctccagaatcgctgtctaattggggatacaacacagaacgtacagtaattaaatatcagagccatgaagtgccatgatgcaatgcctaccagagggctaggaaaggtcaaagaaggggccagagtgttgtctggattgtcagggaaggctcctgggaggggtctgggctggacttttgagacagggaagttaaggtcagcagaggtcggggaaggagcagcattccagaatgagcagatatttggagttggaaatgtagctgagggcctcaggaggtagtaggaagctggtctgggtaaagagaacacatgtggaaatggatgcagatttcattagagagacaagagtggccagattatgaattgtcatggaattcaggccaagggtttggatttcataatttagcaaatagcatgatagactttacatcaaaggtgagctgctgtgaggcagtatttagaacagaagagaaagaaagccagaagcaagaagaccatttggctggcagttttctgagagtaggaatgatatagatacctgaattgggatggtgcagctgagaattactgaacgattaacttcatattgcagagaaagaaagcactttacttagaaaggcgacaaggagggctgaacggtgtactaactttgcaaggctagttcacagagagaacaggagagttcttgcaggggggaaacatgggactttgagctagattacagggaataagttgaggaatttggtttcagacacattaaatcagacataaaagctagtcttcatagcagtgtcatgaaaacatttgaagccatagtctgaaattcaggtgagaagccaaaccatatcgaagaatctcctgcattcataagggaaaaacattagtttaagtgaagacagcagcggggccaaagcctaactgtgagggctaactactgtttgggtggaattataatattttagataagatttaagaggattctaattctagctacttgataggaatgcgaatgatgataaggcttttagagttagataagagagagggctagcaccctgatattctgtaattgaaacagagtttcaagtcctttggtcaagtattacccttattccttcaggaatagtagatattttaagattacagataggttatcttatctaatttacctacctattgttgaaattatttaatttgcatttaactgtgttttcactggcttatcatttctctcttctagagctaacttatctcttgttatattccagactcttggtgtaaattaccttcattgaaaattttggagaaatatagtgttttatttctttatggataaaatagtcccagagagagagacacaaggatggacacttagaaaacagtcccagctactcgggaggctgaggcaggagaatggcgtgaacccgggaggcggagcttgcagtgagccgagatcgtgtaactgcactccaaactgggcaacagagcgaaactccgtctcaaaaaaaagaaagaaagaaaacagtccaaggagagaattctaatgcctgacagaagtaatgtttagaatgagggcttctaactgaagttttcacagacataggatagaaatcttagcaccagattttctgccaataatagagttagatgtgtgtcatttgctcattaaaatggaggtggcatcctgtcctctaaaattatatcatgatctcaagaaaatgaaaatgtaccatttctactgcatggctgaaaatgatttgggctgattataaaaattagttgtaatggcatgtatcagtatacttaaaaataaaaaatgtactgcagaatgtgcaatggaatagaaaaggactttgattatcaacaagagtatacttcatggtaggtgaaaagtaaacatgaggccattcatgagaaaagtctgtcattaatgcatcagtgtgtatatgagggctccaaggccattgattctaagaataactaaactccctccaattctcttggccagtctgtttgggtggtgtctgggaatctccttaataagtcactgctatccacaaatatcactaggaccctttcatgacaagagtattaactttggaagaattctgtggctgtcaagtcaagcagttacctgaacagaggcagaatatattggaagatgatgtgaactcattcccagttgtcttagctcacttttacctcatgcttggctgtagaaaactttttgtcacagttcagattaggccatggtacaagtaacagcaacccaaaaaccttaaataggcttcaagaagataattatttctctttcccaaaaaatcctagaaatactccagggctggagggcagggctggtcatctctgttccaggaaatctttagcgatccagtttctttcaggctcatgctccaccatcctgaaggggaggctttcctcctcatgaaccaagatagtagctttcatattccagacagcaggatagaatgaagagccaaaaagaaaggcaaaggcgtgtgtccactgtattgttaggaaaggtcccagaagctgtctcatgacacttttgtttatattccattggccagaacttggttgtatggctataccgaactgcaagggaggctgagaaatgtagccttctctctaggcaaacatagcccaatgcataatctaagacatgaaagaaggggagaataaatactgggagaaagtatacaaccacaccttccttttccattgcagtggcaccatagtatcagcaggtcaatttatatagctgcctgcggaggtgcctgaagcagagtggcagttgcacagtagtgcagcagtcgctaagagcaggtaccctggagtcacatcacttaggtttgagtccagatttttctcatatgtaaaggggaaataatattagtaccttcctcttagagctgtgacaattaagtgaaatactgagtatggcactttcagcatggtacctaagacttcaaaaccatttgataaatgtgattagctcttatattaaaagtaaaatgaaagttttagagcatccatagacatgtaacttttctgtacatctctacaatgtggaggatgtatttacttttttccagctataagagtcagagtggttttcatttctaactgcacttttctccttttgaaaataagctgggatgtgcatgcttggctgggaggatggaggtggtttgtaacaaattgtatgaataattttcttgaattttccatgggttctgcatgtttcattgataccatcttacaggcttttctttataatagttttgatgtgaaggattactttacagtaagcatctacaggttacccctttccactgatgtaacaaagtgggaattgggcaccacatcaaaaggatgaggccattgttggccatccttggatggatggggttcaaagatggcaatgtggagtgggtattctctgtgtttgcctgtaaaaggatagacagctctgaattgcaaaatactattgtctatcaaaatgtaaaagtttggcttgttcttcatttagaaatggtgataggaaagaagtgggtgaaaatggttgtgttgagatatttttgccaatacctaaatgctcttttgcttctctctttttctttctttctcaaagccccctctttgttctgtggcttttcttttgtaactcctccagactacagctttgttcccccttcttccactcctttctggtcaggtactgctttactacttttatttgtctcttcaacttgcttctgcttgcaaataaaatatttgagttccatgtatggcttctcatacggatacatctcctcacagacaatccctcgagttccattaccaccatgcactttactcttctctgtcatagtcaccgttcatcatgacatttcactcctctggtgtttgtgtgtgtgctcatgccatgagacattctataatttatctgttggggagagtttgcagagggatggggctgaaagtataaagggggatgaaaaatctataaaatcattatttttcttgaagaccagaaagtttagttgaaaaaagccaatgtttatgtattttcatgaagaaaataaatagaaataaaatcccaactttgttttcaaatataaaagtaaaattcagtacacattacttgaaaagatgactggcgcccatgaattctgcagttcttcggtttgtgcatgggcattttggtcttgatttctgtcattacccagagagtttaatggctatttacatgacatttagggtatacattagataaagtctgttttctgaccgatttttaaaaattaacctgcacatcccaataaaaatcatagaatttaaaactagaaaaaacttagaagtcatctagtacaaacatttcatttcatagatgagaaaaaatgtggccttgaggggttaggagacctatgcaaggtcaccacacagttgatgattgggtttttccatcataggggtgtttttatgtgcaccgactctaacagtagtgccccagtaatgggacagttttcagtgagaaagctattaaagtggtttgtgtcctgaacagtaaaacaaaatgacctatttttactccctttacagttctgaaatctagagtattgccattcatttatttcgtgatggacacctggagtctaaaaaaatttctgtcattacaaagccatgaataataggtcagagatccctgtggccaagtgggcaggctcttccagggtaacacaggtcataacttctgctgcctgagccctgggaactgttaaaaatacagatggttggtgtttcccatttgtctctttttcttacacttaagttcctttaccatttaagatttataaagtttcaccaacctccgatgagtgattctcagaatcactgaacatataattgaaaacactttataaccccaaagagcaacaggtagagaagttaatataaagcgtgccatgaaacactagagactaacaaacatgaaccactggaatggagttttcttttcagaacagggccagcagggccagggagaaagttagctcctctcctgccatcgaatattaaacacgcgcgcgtgtgcgcgcgcgcgcgcgcacgcacgcacacacacacacacacacacacacacacagagaaactcaactctgaacacaggatatttaataccctgacatcttatttttgattagatacatcagtaaagtttttctgtaaggcagtatttgtttcaaagaaagaaaatatagatggtatttgtgtgttccttctctgagacctgattcacacctcttcacttaggtgaattatatagaaaacaataactaaatttatccccaaatagttttaacatagaaagccttgttagggaagaaagtgccacttaaccagaagtgataacatagatttgacaagagactgacatcagagcaaaatatttcgttgttttgagtgttagttaaagcagttactggataaaaacataaagctttaccttggaggtgctggttagattactgggccatcaataggaagtgtatgatgaaattattttagaatctatctccttagatacttagatattaacgagtttttttaatttgtttttttgttttgttttgtttcatttttataaaaactagtccttactttgattgaggttcttatgaagaatggaaaaacaggacaatggttctttaaacttatgaagcgaatttgcttgcacctgattgaattgaaacagcaattctgctgctttcaagctcctctgccattatcgctggtctgtaatgaaatcacgactgtgcatttgatagcatcaataacattcatctgattaggttgttatggttgttaacgaactgcaaacctactgtcattgcttgtcatttcttgacagtgttaagtccaaaagtgctgggcattgccatcgctcggtatgacttctgtgcaagagatatgagagagttgtccttgttgaaaggagatgtggtgaagatttacacaaagatgagtgcaaatggctggtggagaggagaagtaaatggcagggtaagttggccctctcgatgtgctggtgcatgtgaaagaaggggactgagcagttgtttgcacccattgtggcaccagggagaagcctctatactgtattacagctttcagcccacaggcctctgccctctggaaactggtgctgtgttttgctgataccagggactcgctgaaaatatttgaaatgaatatgatagtgacataaataaaattcacctgggcaagtgggacagcttgctgcttggaaaagagtcgaggagcatttcagttctttttagaccctgagccatagagctaaactttatgtgtattgcaaaatatctataagaactgctgatgtaaattggaaagaatgggacatagtacctctgtcttttcatcctgttctacagcagaaataggaatcattatgcagcagagcccccctgtattatacttaatttacatatttatttgtgtgctagtggattagaacactgtttattttattcctccatttcgatcatttactctattaggcttctaagagcagttaaaccaatcttctcacctacaatggacataaaaccccagtttaattggggtgttatgaaaacaaaatactctgtttgtagaatcctttgaagtgtcagatacaaagtcatgttgctgtgttggttgcttttcttttttaggtgggctggtttccatccacatatgtggaagaggatgaataaattcaaatcccgtgttgcaccctgcaccaaaaatttcagagaagggataaatagaagcctgcacagcatcgtgaattaactgaagtgtttaaaaagctgcatttctggctgttcaacatcctccctccttagcccctcctaagtcttaatgctgagatttctaaagatgctggtactgacagattaatggcttgcctagagctgtgcaagaaacagcctgccagtctgtcattgtcagggaccagggcaaaaccaagagctgttcttcccagaagagccctgcaaacacattggttcgtgcttccctttacttcttctggtcagataccatgaatgccagtcatcagtaaatcttaatacacttttgctttattctcacatgccattcaccagattatttgatggtacaaagaagcagaagtgtaattttccttttcccagcatgacgaaaaattggagttctgccatttgagcagcttactggaaagatccagccttacttgtcttaaattgtccaacaaggtgactcattgcccggcaaacacttttaccctcagatgttactcatgatattataaaatatgaggccagtgctcaggtttgcatcataagtgagctatccctgaagggttttaattacttatttggtgtcctgattatatttgcaaacttctttataaaaggtgaaaaaagcacacaaaagagagggtgtcttcatattaaaccttcacaaccttcatgatttcataggattattttggaaatatagcacttgactttatgaaaggatctgggctaggtatattaagggtagttgccaataacctgaagaagctggcattgtttacagaaacagatcaagggctataatttatgtcattttatagcagcagtatctattaatacatgccttttcctcccatccacctcccccgcacacacacaaagatgacctgggacatgatttttttattcccacattttcttggagcacaaacaactttgttgaggattttggaaggaaagcacaactgggtcctttattcatttctgggacagaaagagggtcagtggacttttgtgggcctccagcttctctcagagtctccccctctgcagcccatcctgggagtgtattaactggagggaagatgggtcttgcagtacatttgttttgcccagccatcactcttttttgtgaggagcctaaatacattcttcctggggtccagagtccccattcaaggcagtcaagttaagacactaacttggccctttcctgatggaaatatttcctccatagcagaagttgtgttctgacaagactgagagagttacatgttgggaaaaaaaagaagcattaacttagtagaactgaaccaggagcattaagttctgaaattttgaatcatctctgaaatgaagcaggtgtagcctgccctctcatcaatccgtctgggtgccagaactcaaggttcagtggacacatccccctgttagagaccctcatgggctaggacttttcatctaggatagattcaagacctttacctcagaattatgtaaactgtgattgtgttttagaaaaattattatttgctaaaaccatttaagtctttgtatatgtgtaaatgatcacaaaaatgtattttataaaatgttctgtacaataaagttacacctcaaagtgtactcttggaatggattctttcctgtaaagtcttatctgcgactctgtctcgggaatgttttgtctgttgccgtcagccgaactttgttatggagggagcagcctcacacaagcagaaacactcctgtggatggtattgtagcatgtattgtttattttagtcaatagaccctctccttataaatggtgtttagtcttcctgttgcatttcatgggcctgggggtttcctagcagaggatattggagcccctttttgtgacattaccaattacatctttgtccacgtttaatactttgttttggaaaatttaaatgctgcagatttgtgtagagttctaataccaaagacagaagtaaatgttttccatatactttgtcttgcctgtatgcagccctcgtgtaatacggtgaattagagtggtatttcactttgtattattttgtaaatatgtcaatataataaatagtgactaaattgat

SEQ ID NO: 567 - DNA, 132899 bp, Homo sapiens
gctcagcaggcggggcgggagccgcgtgcgcccgaggacccggccggaaggcttgcgccagctcaggatgaggacaggctgggcgacccctcgccgcccggcggggctcctcatgctgctcttctggttcttcgatctcgcggagccctctggccgcgcaggtaaccgcgggcacgccagccccgcagtccgctgggtgcctcgacgccacagctctgctgccttccagcctggggcagggctgcgcccctggggcaggtcacggctgctttgctgttggggcgggggggctctggagccggaagagtgagtcgcaggggaggtctggcagaggaagcgccccagtgccctcgggggcccggaggagggcgcggtggatgtgggaggacagggcccttctggtgcagaggggacgcggtgcaccgtagagtaggcgcacggaggcttttttggccgggtgcgctgctccatcgtcgcctctcttatataatgttgctggagtatggggttccccatctgccctcttgcgtcccgtccctcccgttctcgcttttccttcggcccttggtcaccttggccacagggccaagaggagcctccacccacagcgccaaggattccccacgattcccggatttcactgcgcctacggtgcgcatcaggaaggaagtcaggttaaataaaccatctcctccgaaagtgaccaagaccaagagtcagctatgatgccctcacccaccgcctagagcaacaaacctttcttctcattggtttatcagctccaaatgaccccgctcccccaaggctgacagcctcacggtgaagggcaggtcgcctgcttggggacctgctgcctctcactgcggaagcaggaccagaaacagacagccttcattgatgttcagggtagtgccagccccaccacaccacaccccttggcagcaaccggttgcttttactttctctttttgcctgggcgaggggtgtgcagagaactttgtttcttggttggactgcatcatgggcactcaatgggccaccctccaccggccacttctgttatcgtgcctgtatgaggaaggaaaagattgtccaggcagtttgaaaaacattaaattgttggtggctcttattttctttgcagctaagctaagttaccatctggtttagacttccttcggagagcgatgggaagagatttctcagagtgtgaatggcatcatcctatctacagcaaggacctggaaatgaaccctgctctgagtcacacttctctattctcctttgaccctgtgtgctaggaactaccaaaagaatcctttaaaataagatcctttattgccttgataatttattctgcctgccccacaatccaaggtggaaaagttcactgcagcaactaactacagtgaaaatgcactaacttttcaatcactaacctcttggttcccatcgacatctgcttcagtcctgtttttatctccttcacaaatttcaggatttccctaattcttgcaatctctgcaatcactgccctttatcactgacccaaagcaaaaagcaccaggtttaactctgttccccctgtgctaggtccccacaggttttgttatcctgtatccttccttactcctagcagctactctgatcgattttctctcaccctcagagcagacttgtggccttgtttggggaagcactggaattttgaacccccagccatttgggtcaattgtttggcaagagtgtccgcttcatgatgctggtgatggcatgcacctcgtcacatgtgcacggctaggcttgtgcaggtggcctctattacccaaacactgaaggagcccctctgtgtccttggagagatgccaggtgcttagtttacatttttgcctgcttggagagctaacagcttgaagtaaaccaatccatcagggactcctgaggttttcaccagccaacaccacccaatcgtgcgtgaagactttctgactccctggacattgccatggactcaactgtcacttcaggacctgtttttgaactaacaaacctagacttctgattctctcttgctgcacctacctgtacattccgaacacatggtagagactctacaaaatgcttaatatgtgatctatggacggttcccctgaaattataaatgctgccatcttcatccttcttgttttcccaagctatttccctatccatttgtctgtggttataaatgtcaatatccagcttctctttggaatgtgtgaagctctttggtctagggaccaaaggcaggaattatttagtgatcagacaataagaaaacactgaaagagatgatttgcctttgatggatgtaaaaatactaaaaatttattttcaatttatggtaatgctacttagccattttctctcaaacaccactggagaatttatataacatgaagcatatacaaaatgcatctagggggtaatgaggcttctcttcatcaacttctgccttttagatttgccccaatattgtacttggaggtaaatattaaaactccattgaggactggtataaagttgtaaagtgaacaaaacccagtagaaagctattgataaagaatctattttataaaataagttttatacaataaaatctactctgtaattaccttttcaaagtatatttctaaaatagcttatatgcccttctgtaccaaattttctaaataagggattatgttcacactttctcagtcctccttccagctcttcaacctactatcccaataagggtcgtaagactgaggcagtttcaacagctcctgctaaggttaaagaaagatacggggaagcatcatgaaaggataggactctccctatctaatgtatgtttatacataccttatatatggaggctaataagtttcctttaagtatatcaataattaagatctgtactaagtgaccactataagtgtcacattgaaattgcatacttggttcaaacaagggattagtctgagaaaaacatctatattcagagatgtagcagtttgttaggaagtttggcagctccactttaacatagctactccacacctctcctgtagtgttttagtgtttcaatctcggactcctaactcctgctttttccactgtataaagaaatgtagctaatccattggattctacaaaaattttgaaaaatccagaactgcaaactgcaaaggaaggcaaagctgctgcttccccagttcacctgtttgggatccagcacacaaagcagaatgcccgggaaagacagcagcaagactacagggcaggagaggggctgtttccaacaagggtgatgggcacgtctcctgcaggagcagacttcttttttcttctgtaatttttgatactttggaatgcaagatttattttggagaggcaagagagaatactttggaaaagatgtagatcagagatctgagtagctattgaattgtgggagaaggccatgagagaaagtgtgagtagtaatcttatagcacattttccttttttgttgactgtcttcccagcctgtgtccatcaagtagaaaatggcagaggaatgtcaaagaagaaagtgtgagggatgtggctgggcacggtatctcatgcctataatcccagcattttgggaggccgaagtgggtggatcacctgaggtcaggagttcgagaccagcttggccaacatggtgaaaccccatctctactaaaaatacaaaaattacccgggtgtggtggcaggcacctgtaatctcagctacttgggaggctggggcatgagaatcacttgaacctgggaggcggaggttgcagttagctgagattgtgccactgcactccagcctgggcaacagagcaagactccatctcaaaaaaaaaagtgtgaaggatgaaagctgctatggcaaacatccttagctgcaatcctgtggaatacttttaaaattcagatttaaaataactttaagctttaaaggattgttgttgctgttgttgtttctcttgtcgttgcttctgttatttaaaacaaaacaaaaaaatccttccaaagttcaagctgcagtgagacttaattttatagttattatttacatggtaaaattcccctcaagtcaccagtccctggtatgggaatttttaactctgaaagcctttgaattattactaggaaaagcatctggtgttagtgaaaccagtgactgtgaagctggtatcaaaatgaaagtgccttttgggaaccaaaattttacaggtctttctgctgaactctggttcactgacagtgattgcttaagcttgtctaaaatatttcagctttactcttatcaacatgatttgtgctgtaattgtttaaaattttcctttgtaaaataactaaccaaattatctgattatagtttgttgtaacagatgtgaatcttattccacaaactcaggtgtgcaagaaacaatgcattactttattttcagaaatccaaattaaatttgatgctgagctcccattccaccaggttgccagaacttcaataattgtccttactggggtctttgccagctcatgcaaagtgccaggggaacattcagggaggattcttctttagtcattggatcccgctggttacctctgggttttccattgtccaaacccacaggatcttgtatctggtggctcaagactcatcagccatcactttggtagttcctggagtttggggttcagccttcttaggtgatccacactgtcaatccccccaggctttccccaggccctgtcgccttcctgagggtgccacaagccagtgtatggctggatagttgcagacgactgtgatgaaactgaggacaatgaaactgccacagtggagctggccacaggttctaccctcagaacccagacctctgtttcttcttgtttctgtaccccactgttctgctgctccctcagaaatttccccatttcctctgagatacctcaatgaatttaggtctccaaaaaatatctagggggaagtggtctttaagaaaattgtccttaagttttcctttttagtggccccactaacttgccctaaggcagaggagcacagaggcctcactatgtacttggatctgaagaaaggaacatatatatagtgcacatgctgtgttaagcatcgacttttcatgtaataatttaccctgccgtagtagctaacatgtaagcaaggcagaattatggtcccaactagacttttcattgagatgaaaactaaagagcttcttttgtcttattaaatgagaagggaaaaatctttcatgaaatagcaacaacaaatatacatgctactctacacgctttacatggattagctcctttcatgctcacaaccatcatatgaaaactggagcacagaggttaaatgatttgccctgatcctatggctaacaagtagcaggagcaaaatatggacccaggcggactggctccagagcccgtgttctgaccctacacactgcactgcctctctgctcaccactgtcccaccttttgtagtcccctgcagcttaaaaagagtgggaacagactgaggatgggaacagtccagtagtgctcagactctcctcagcaggcagggagcaaggcgcttcaaccacataatctacaatctgtctgtccatttgactcagctaatgaccccttcaccatcgtccatggaaatacgggcaagtgcatcaagccagtgtatggctggatagtagcagacgactgtgatgaaactgaggacaagttatggaagtgggtgtcccagcatcggctctttcatttgcactcccaaaagtgccttggcctcgatattaccaaatcggtaaatgagctgagaatgttcagctgtgactccagtgccatgctgtggtggaaatgtgagcaccactctctgtacggagctgcccggtaccggctggctctgaaggatggacatggcacagcaatctcaaatgcatctgatgtctggaagaaaggaggctcagaggaaagcctttgtgaccagccttatcatggtgagtattagagagggactttgaccgatttgctgttgtgcttgtcacatgtggcattaaacatgcacaatttagtaaaaatagagtcgtacattagtaagggcagtgagtaagctcttcacttccaggcactgtgcagttactttgagcgacattcttacaagtccatggtatttgcctctactttgcaggtaaggctaagagagataaagtgccttgtctgaggtcacacagccatgttgtgataaacctgggatttcatcagatagatatgtacttcttatgatggtcttctaaaccctagaggaaaggaaaccctagaggaaaggaatcattagatttgtacaggctaaaagtcaaatgatctaataatgttgatcttattctaagttttaaaagaagaagaaaggtcaggcgtagtggtgcatggttgcggtcccagcttctcgagagactgaggcagcaggatcacttgagcacacaggagttcaaggctgtagtgtgtaatgatcacgcctgtgaatagccactgcacttcagcctgggcaacatagtgagacacccatccttaaaaaagaaaagaaggagaaggaggaaaaatatattttttcttgcctacggattttgaataaaatgggaaaattttgagtggattttcttatttattttcatttttgcatggcaaccaaattttgatgtttatatttatgattcagcattttaagagtggagtttttcagttgcttccgaaaataagtatattaatattgccttgcggggagcggaccatggacttagccctgagtctagggactggattgcaactaatttctaagttaaagaatgagtagatttatttttttaaccattaaatgtaattagctatctcccaagcaaatatttttcattatgttgctctaaattacaccaaatgtcgatatgcatataattatgtcctctaagtcctattatttccccttgcctttctttacaaatttccctagctttacagtggctttcttcttctcttaaagatcatttaagctaaatttggcctcaaagtcactatagcagcttgctcccatactttccattatccatctgcacaagtttttctttctagctttctatttcctagtgaggatgcaagaattattctgagaatgtcaagttctgttgtggagaaatattagagaattagagatagggtttccttttcatcattccctggcctttgaatagttgacagtctgtttctgcgagccagtttcctcctaaaagtaaagcagttgctttttggatatgacttaatggcaaatttaaattctgtgccacaaaagcccttctccaacttgccaactaagaggaaacacagagccaaacaaaatgccttttaattggatttaacttgtttcattgtatttgtccagggatcagaaaggataattttcttggcagggttcttttagtctcctgatctaattcttttgaggggcatagttgtaatcttaaactccctcagtccccagtgtcttcatttcaatataactggttttcctttttatcctatgtattttatgtatgcatttctaatgttcttctgagacagggactgtggatttcacccagctgccaaagagatcagtagcacaaaaaaggttaaggatctacccaggggaccacccagagagagctaagcaatgccaccagcataacccaaaggcatgaagtgtttcttgaccttttcaaatataatatttgaaacactaaagctttttttaaagcatatatagttgtgactagtcaaggcatacctcaagttttaatttgcacagaaaccagggccaaacttgccacctcttctctgtttctgtctgggtgactggtaccatctaagttctacatgtcagaaatcagcaagtcacctgagaggtttcaggctcgcctcttccaccactccaatataatcaaatatgaagtcctggcaattctacccttttcaatttatgtatatcccttcttgttcttaggttagggactgctgtcttaagttagggactttctctaggactccgctctcagactctcgatactgattgttgtccccaccttcttatctagcagtatataaacaaaacatacaagatacccaagtcccaacaaagtgaaatccaaggttacctggtttgttacagcaaagctagggcttaaaaccagtattccattccccaaacatagcttctttctttcccccttggctttagcagtataaaccaagttttcacttgtgatacaagaacattaatttatcactgtgccttgggttgcctctcaccccaactcctatcctgtgtgagtcgtgttcatctcagagaaaactgaagttgtataaattttatgagtgaactgcttttgactagcacccaggtgtacattaatatcattaagataccttgatctcactagcacttttcaaattttgaatgtttggtgaatcacgcagaggaaatggactttttgtggcagggtggctgcagaactatcagaattctgggcaactcttagaagcctgccaacaacctctttatccattgaaactattttgtctcatgttactgatgacattaatttgctagttttctgcataatcacctcatctcacaaatttgtaactattgcataataaagctgttgttttaaggatgctatcatcataaatttgcacattcagagaagattcttcccaggaaagtctgtcttgctaaggaagcccatggtgtgtaagaggccagcatcagcaaagaatgtgtgggaacaaaatgcttagtgaatagttagcgtaatttagctgcttctggtgtggtggttgtatgcttatcattcttcaaagcatatattgtgacttagagagcttattaattgaagcccagctttgagctatgaaatttaacttgaaacttgagaaggcacccgctgatgtcacaagttgtccttataggtcaagagtctaatcagagagagcccattctcattcctgtcacttgcagctgagtgcctgaatgtatcacttgactactctgcaaaaatggggatttcccagacaagtataatacctcccctatgatctcacaggtttatgataaagaacaaatgacagaaatgtataccaaggcactttgtattccaaaaatcaaaggttttagaaaagaaaactgatggctctacaaggaacagtctttgtgttcagggactgtcctcttaggtttgtaatatgggaaaagaaactggtcatgagctattggggggttttgatgcggttaaactgaaacataggtaataagcagaatccttataaaatataaggtcaacacactctttaacagaagtacgcttttgaaaactgtttctatgacacagcaaaacaaaaccagtgatctttaaaagactatttgccaagaaaagcatccagattattattaccttttgctataggtctgcttattacattctaagctgttaaatggcctcacactttagttagacggacactggaggaaaagaaagtagaatcaaatactgtcttaagcacacttttaagcaaatctgtgagacatttggaggaaccctaattgcctggtaaacggtgataagatctgattactatgatttacctaatggccattatttgatctgttaatgactgaggtttttagcaaattgtggaccgaggttttggcaaattgtgacagggatacagggatagctgttctataaaaacacctttccaagagaattagtattgatataagtatcaaacattctttccagcatttccaggcatatttgaggttggaatcacttttcagttcctccccatgtaccagggaaaatgattgaagtaaaagctatgtctactacctcactggccccccgccggtcacatgactgccccattgaagctgctgcttctttcacaccccaaattaccatgccttgtaccttcccaagaatctgctcagaaattcagcagctcttccttttacttcctcaaaaaccacagtctcaattctacctccagtctctgaacaatgggactatttgtccatctttctaatgccgcaggtggttccaaagtccacacccaccctcagtggttccaaggaatttttctggctccaacactttctaaagaaaagaaaatagaggtaaatgtaacctcagccagggcaccctttctggtgaagtgctctgcggcccacagcagagttagtagaccctcacctgatcaagccaggctctttcagcgcctcatcacaccacagtaagtgaagcttcacatggttgatcactgaacgctatccccagtttgcaaaagcagaaacagaggctactagaggttggatagctagcccacaggcaaacagtgggttagcagggagccagcattcatatccagacctgacagcacccatgctctgaattcctacactcggatattgtattctaaacaacgtttcttttaaaaacagttttagaaattagccacctgacgctgactacccagtttttaactctcttttccccaacttcctctccaacccagagatctataccagagatgggaactcttatgggagaccttgtgaatttccattcttaattgatgggacctggcatcatgattgcattcttgatgaagatcatagtgggccatggtgtgccaccaccttaaattatgaatatgaccgaaagtggggcatctgcttaaagcctggtatgtatgggctggtaaattttatgtggaaaggtagtacatttatatgaggcaatagggagaaggaagagttcaaagtgactcaaaagtgactgcaaaaatattatcccggataagaagtgtatgtttggaggagaagagagaggtaatgtgtagccatgaatttgccttcagaagcaggcccggaagtgaaccaaggcggatggtgtcatggaggaggaggagggagtgttccatagcaccccagggagaggaagtgtggaaaaggcatgcacaattaggaaattgctgctgacctttagtagtttcagaagactagagggggtagaagctggattgtagtggaatgaagcatgaacagaaggaagtaagcctcgtaagtttcacggagcagaagaagagacagttggcaaaggacaaaattgcaacaaatttatgtagttacaatcttatttggctttattgcaattctagaatcaggcaacacctcatttcataaaatagactactgtaagtgttccagttcgttgaacagaggggattggctttgtagacagaaaaagggctgaagaaagcaaaaacagaaaccgaagagtggattggtcatttcaacgtaactttccttgtaagagcaatagagaaataattgattggtcaacatcaggtgacttcaggttaagcattgaaacagagggaacttcattatcagtccaattaaagattgaaactggcctgttggggaaattaggcagttgtctctctctcctgatttctcaaaagaccagatgacaatctgtttcagtttggtgatgtggaactttggcatgggtgactccattttgatttttgagtcctagatcaggagcttagtccaaaacagtggcttttttttatttaaaaaagcaaagggtagtttaagaaagagatcagttgaaaaacacttttagaatggtgaaatcttaagtatgtttatggcctgaagcaaagagcgggaaagagaagagatagatcttcctggctcaaaattggtgacactgttccttccaccattcctgtgtgtttgtcagagtgctttttctcgttactttttaccagaagcaaactgttcaggatttgctaaagaatttgctgttctttagaaagacagagagagaccaaagtagcaatcacatcattatctggcacataactgagacacagtttctcaccaattaggtgagagttacaggggatcacggtacctgacatgtgataggtactcacaaaatattacttaatggacaataggttgaaagaatctatagcaaagagaaaggaaagagctccagacctaagtaataatagttaatacttaacagggctctgccaggtgtcagatactgtttcaggctctcaatatacattaactcattcagtcctcacagcaaccctgaaaggtaccatactttatccccattttacagatgatcacagtgaggcacaagggagatatgtaacttgcctaagatcacacagctaataaatatcagaactagaattcaaacccaggaagtctggctatgaagtccttgtcccaaacagctacactaggctgactcattgagtagctagccaggtggtattagtaatgctgatccctccttcgggaatgtgagcttcagaatgcagaagctcttggagagcttggagagattatactgggttaagacttaagatttcagggtgcaacagaatcacatggagagtttgttagaacacagatatctagggcccagagattctgattcagtagatttttggtgggccccccaaatttggcaagtttccaggtagtgctgataatgctggtctgggaaccacacttggaggattacatatctaattagaggcccaggcttctcaacacctgtaacctacctactaaaatagaaaaagccagtattttcttcagctataattgataataagcagagtttggtcagccaggtatcaacttcatttaactctccttatcatttggatcagaaatttagatgtgaaagtttgcttagaggtaatccaatgtaaacccctgtttctcaggtgagaggcagaaggcccagatcagtgaaatgacctgtcagggtcagaccacatttttgtggacactagtgaaggattctttatcctccttccccactgtacatatttacccccactgtaccttgctgccttgacaggaatgtatcttggtgcctttagcctcctgtgggtgttgtgtgtgtgctggggctttgggggtgtgacacatacagtggtgttaatgcatgcatatgcttcctagagttactttttatggaagaagcaagagaaagtttctcaaacctgagggctgctaaatcatggaggtcatgttgtatagcaaacacactgccatcccactcctggaagcttctggatttacaagtgtagggcctcagtggtaataatgaacctttagacaatgtgctttcaaatccaccctattttgtttttatcaaatgtcagaatctctgttgctatttatgctatagaaaaatggctgaagcagcaggatgtgccatcagaggatcaacaagaccagtgccctcattatagctctgtcacagtcacctctaggtctttgttcctgtctgttaaataaggacattagacaagatgatctctaaaggcccttccagcttataggatcatgagtataacatctgatatgtaactggctataggaggccttttggaaagtcccccagttggagcctgggatgcacttgacacagcctgcattggacttcccctcttgtggggagtacacaggaggctctgaatatattttgaaccagttgttttgaaatttttatttctcattcaggaaacagcttgcagtttctttgtctgaaattatgcatactctacaaacacatatgtatatatgtttctatgcacatatatacacacaaatacatatataatgcatatgtaatgtgaattacatatcatatattctttattaaagtattaaggagaaatttggacatagtttcccaaataaggtagtcacttgggctcaatatcttggccatttaagcagcatgtctgtgcacacacataaacatacagtggtttttatgcaggctgtgggcaaaccctctgtcatctgccactatgttcaaatgagcttgttttccattagctcagtgttcacaacatgtgcacactgagacccatatctcaggcagagggcagtcagggacatgggcgaaaacacagcattgtaattgatagggataaaaggagaatggaaaataagaaagagtggaagcttcaaccagcctgagtcatttggtgtgtcatgattccaattttattgtgatcaaaatatggtctaaatgagtgatggcagtctccctttgggcatatcctaagagtatgcaaattgacttgcagtatttctaagcattctaagtaatagaaaacattatgtccttactttatgatcactaacgtgtctttatcaacagaaaacggttgtgaagataattgggaaaagaacgagcagtttggaagttgctaccaatttaatactcagacggctctttcttggaaagaagcttatgtttcatgtcagaatcaaggagctgatttactgagcatcaacagtgctgctgaattaacttaccttaaaggtagattttatttgcatgtgatagagcaaattggctaaaattgtaaaggtacttcttcttctgttttcatatccagatgtgtttctttgtatgtaacttttctgacctctcttgggatttaaacttctacactgaaacccataagcaaaaaagtactgaatgtaatcatatttcaccattgagaaatgtatcttgtgatggaaactaaagagagattgatgttcagaaaacaaggttgggtagcaagattaaactgctaccctaatcctaaatgaaaggattttcaaaaagcgaataattaaactctttgaacattgaaaaatagagaattaaaggaagggaaggaagatggttaagttacactagatggcctcagtaaacatccttacattgagtgaaagggtacagtcctcaggggcaaggagtgttttactaaatcttaaagtggatttaataacatggacacagaatgggtaggactttgttttgttttgtttgggggatggtagtggtaattttttaatttttaattatgaaaacttaatagataagaataaataaaaactttaaaagaccatttatcctatcataagaatttaagtatcaccttgttaatttcaataacaaaccctattggaactttgattggaattgtattgaatcatagattcattaaagaggaattggccaggtgcggtggctcacacctgcaatgccagcactttaaaaggtaaaggcaggaggattacttgaagccaggggtttgaaaccagcctgggcaaagtgagaccacgtctctacaaaaaaaaaaatttttttttaattggctgttggcatgtgcctgtagtcccagctgctctggagactgaggtagaaggattgcttgagcctgggagattgaagctgcagagagctatgatggcatcactgcactccagcctgagtgatagaggaagaccttgtcttaaaaaataaataaataaaaggtattgcagtttcaatattgtcttctcaaccatgaaaatgatatgcttttctatttatttaggacttcttttatgtactcagtaaaattctataactctttccatagtcttgtatatctttcaaaagaaactatataaacaaattttaatattatatttaaaaatcaaggaacctaagttactgagtccctgatgagttattctttgaatgaaagacaaataattgtaatatatgataatgatgatgtgccagacagactactaaatgctttttatacattatctcctttcatcccatctaactaccttatgaggtggacgttattgttatcctcattttgcagatgaggaatgcgaggctcagagaggaaacataacttgtccaaagtcacccacaagtatttagcagagcctaaatttgaagagtcagtttgacttgaaaacaaattgtatcacacatataaatggattcaccttttataagactgtaagttctttgcaggcagaaatgggtctcatgggttgtttttcacttttgcacaaagctgtaagctttattgctatatattaagcaaacatgtattgtctaagtaattcagatgcattctgtcacactattttataataactggaaatatttgataaatgcttactgtaagcaagccctactttctccagataaatccattaatcattactacaacctcatcaaacaaatgttttatcactagataaggaaattgatccttagaaataatatacccaacagcatacagctaagaagtatcagattgggatttgaatatcaacatatagaattgcagaactctatttatgtgaaagagggtctcaatatgttgcccaggctagtgtgcagtggatattcacaggtgtgatcagagcacactatagcctcaactcttgggctcaagcgatcttcccacctcagtcttccaagtagctaggactacaggagcacaggatcatgcccagcttttttgttatactacgtacccctcttagatatctttatctctttttatcattaaaaggccacaggtcttttgtcgctctttttgtttacagctttattcagacctcctttcttacttgtagctttacccttttcctgtattgtttggcacttgaatattcagatctttagaatgaaaatctgccaaataagccaaatgagctagtgtttggcattggagttctattccagacctcactgaagcctcagaaaaaatattgttgcgaatgaaaagtgccgataaattcaagtttcctagaatattgacatttggaaaccgatgacttcagtgaaggagaaaagtgccaaagtgtgacaatcaaatgttgcacgattctttatgcatcagttttctttaataactcatgaaagtaatgtaatatggtaaaggaccttattgtaccctactcctggccggacatgccccgtatttaatacatatcattaattttagaagtatatctgtttctaatgtttcaagttcctcttccagtgtgaaagcttcttaggcatatcaatacgcctaattatgactattggtttcccaagacccaagaaaactgtgttttaacctctaaaactctgctttctatctttctttcttttttcttttttttttttttttttgttgttgttgagacagagtcctgctctgccacctaggatggagtgcagtggcacaatatcggctcactgcaacctctgtctcctgggttcaagcaattcttctgcctcagcctcctgagtagctgggattacaggcacacgccaccacacctggctaatttttgtatttttagtagagacagggtttcaccgtgttggccaggctggtctcaaactcttgacttcaggtgatccacccgccttctatctttcttaattgctgatagcatctggtcatcaaataacaaatttgaatgatctatctccactgtaccacgtgtgtgtgtgtgtgtgtgtgtgtgtgtgtgtgtgtgtgactctcactctcattctgtatctctagtctaaacaggaccctttgggccctagagccataagccacatatatatatgttatattatatataatatatatatatattccattgtctatgaaacagctcctatacatatttctgacccagtcccagaaaaacttgatcatatggggatccatgtctgtctccttctactagattgaaattctcatgagggcaaggactttgtcatttcagtttttacatccctagaacctggcaaataatatgtgtgcctaatgaatttaaattgtcagtctagaatacagtcagatcttctgaatctagaagtacaatggaaactgcttttgataagtcttctatattaataaaagaggattaaaaatagatagtgagacagctactctaagaagcttctgtccttaccttagatgaaagggaatttgacaagctaataggagagcagaactgaattaacttatcagcctttgggtttctcaatagtctgaagatttttgtctattagcattgcctacctttgatgcataaacagccctctacagggattgctgccttacaatcaaggtctgcagatttgtttgttattagtagaataagtctaatttagataataacttaggcaactttgtcactttttaaaaattttttaattcttacagaaaaagaaggcattgctaagattttctggattggtttaaatcagctatactctgctagaggctgggaatggtcagaccacaaaccattaaactttctcaactgggatccaggtaactgctctttccctaccccctctgcacagaacaaatcttcaaaaaagcaaaagcttctcactcaccaatagcttagaaaagtttcacatcttggcagctcttactatggttacctctcagaagaattttttcttcctaaaccattcttaattgtggtactgttattgccaagctgaaccacaccatggacaactgagcatttgaacctctagacctttagaacaaccctacatttttatgtaagagcaaaatgagctccaccacatggcccaggagccattctatgtccctaaaggacttggcatgtctataactcacccatgctgtgtttcatctgcagctgaactctaatatggaattatccgctcgttttcaaactcttggggtctctccccactatagcacccaagtactgacaatataatggttgtattttataatacaaataaatacctcaaagaaagtcttttagggaataaaacaagcaaaatgccacttagccaaaaagcattcttcccaaaggaaggattagacaactttgaaaaataaaatcttaggcttatgacaaatgtagaacctaaagttaacactaatttcagtataaagctgcctgcacacatagtaggaaaactgagttaagagcaataaaattcaaattagccactttagttaatttagtttgctaaatttccttaccagcaaatgaagtaatacttttattatttcagtaaatagaatatttaaagataatttaatctttaactcaaggccttaatggcatgacaatgataaattaatatttttattttatggagtagcagattaagagctactaagcatagaatatggcctggaagtcatttgaggaaaaagtttggtttttgtttttaaaattaactacaacatatcatgatgttttccctttagattctatattttagaagaaagacatatttaagcacataattattcattgaggcttatacgtttcaatttagttaagttttaactataatatgagttcccataaaagcataaaattaggaatacaaattattctttctgacaccatcctggccctaactttctcattctaatgctttgaaaaatgttcccttttaagacaggcccagtgcacctactataggtggctccagctgtgcaagaatggatgctgagtctggtctgtggcagagcttttcctgtgaagctcaactgccctatgtctgcaggaaaccattaaataatacagtggagttaacaggtatctttctcacatactcatacaaatagacaaataggtcttaaaatcatagttttgtgaaaacaagtaaatcttttccaacatccgtttccacctttccttctcctgatactgacagtacagaaaagtacttgatttttaaccctgtggttagatattatcaaccatatatgaataaagctttatttgaggtaatgaagaatattaaatataaatatgtatgcgcccagaagaaggcagagatattcgagataggaaatatacttctgttcgtgtgtggctcttttttctccagagcagtggttctccaggggtggtccccagaccaacagcatcagcatcacctcttcctgttagaaatgcaagctctcaggacccaccccagatttgctacatcagaaactacaggatggggtccagcaatctgtattttaagaaactttccaggtggttctgatgcgtattcaagtctgagaaccactgcagttcatgcctccgtaatgaggcaaaacctatagacacaggagtaagcccaggcttctctaccttgtgccccacagcacccagccctcttctatccttctctgtcaggcaagtctttgcattgaaaaatcaagtaaaaaaggagaggtgcagagggacaaaatgtgtacaataagggggtttttccagggtgtttggggatgaaagtgacacaagaacagctgaagtttttgaggagtggaagggtgtgaggagtttttgaaagaatggagaagaggagtgtattgactgtcaagcacagggcctgatgtatacctggtatttaattacatcctcaccaaatgagagaaactaatactcaaagctggagggatgtattcatccgttttcatgctactgataaagacatacccaagactgggaagaaaaagaggtttaatggaccttacaatctcacgtggctggggaggtctcacaatcatggccgaaggcaaggaggagcaagtcacatcttacatgaatggtggcaggcaaagaaagagagcttgtgaaggaaaactccgccttataaaaccgccagatctcatgagacttattcgctatcacgagaacagcagggagagacctgcccccatgattcaattacctttcaccaggtccctcccataacacatgggaatttaaggtgagatttgggtgaggacacagccaaaccatatcaaggggaaaggatgatttttaaatgtcctgctttaaggaactgtgagtgaagggaataaagcattcaaatgtcttgtcatctaaaaaggagtatagagcaatttttaaggaaaaactagatataaaataaagaatctgaggggatattttaagataataggggaaatgaacatttgtcttccaagttgattcaaaccaaatttagtccatacaacaaaaggcataatagaaaagccagcacaaatgaaaataaactagagcaattgatgatagattaagtaaataccttgcagtagcaattattaaataaatcatgatgtttccacatgattgaataatatgcatttactaaaataactgtgccagcaggaaaatacaaagaacaaaaccaaatgatatgcctacttatcattttaatcttgtaaaaatatgtattcattgagacaaagactagaatatgaaaatgattgcattaagttccattatgggtgatatttttcctctgttcctttatcataattataaaatataacaataatacatgctatttcagaatattaaagttaattgagttatctcgcaagtgtaagaggctagctgaatctgaatcactttatcctttagtaaaaaaaacaaactgtccacatttttttttctttttttttttaattatactttaagttttagggtacatgtgcacattgtgcaggttagttacatatgtatacgtgtgccatgctggtgcgctgcacccactaactcgtcatctagcattaggtatatctcccaatgctatccctcccccctccccctccccccaccccacaacagtccccagagatgctgtgttttcttacaacaaatattccaaatggttctaaatcagtgaagtctgagtaaccaactcactttctggttttgttaacggggatagaagtattctgtggggtttcatacttcattctttttttctaatctggaaagattagaccttcgattgtgagctttctcatggtcaaaacagaatcactaattccatgaggaccatctgtctagcagaggggaggaaagaagtccaggggtaacctttgccctctcatctcttggatgcgaagtgtataaatgtcttattctgtcccttaaatctctgcctgtcctttgttcaacggtgagcgttaatctacatccccttgctaagctggccatacaagaaaaggaggcttgccctcttataatcttctcaaggacagagactggagggaaacctaacaaattccatatccaggaaaaaatttgtcagaaaatgacttaaggcacatctttctactgtctacttggactaagggcaatctcccttgactgtgtccaagcccttaatagtctgtgctcagccatatagcacattgaagcatgttaaagtcacatcattttctgaatcccagcgggaattcctatgatgctatatatacctcatttatgtggtaggcaccacatgaattcatgtcaccgtagcatctgacatcacgtccccagttttccaggactctcattattcaagaaaaaagaatttgcaatgttattgattcacaatagatgtatctttactggaatataaatagctgcttttcccccagatgtctggacatactcagatacccgctgtgatgcaggctggctgccaaataatggattttgctatctgctggtaaatgaaagtaattcctgggataaggcacatgcgaaatgcaaagccttcagtagtgacctaatcagcattcattctctagcagatgtggaggtggttgtcacaaaactccataatgagggtaagtttttaaaaataccctatttgagaggcttaagccattttaaagtatccctggttttagactctttgtgggaatgaaaagcttacagtttgatcccacagatcagccctgtcagataggattgtctctggtgatggaactgttctacaattggtctagtatggtggtcactagcaacatgcagcttctgagcagttggcatgtagccagggcaactgaggaactgaattattacttttatttcatcttaattaatttaagtggccgcatgtgcctagtggcaaccaatttgacagtactgccattgattgatttccctcttctcatgagctaaattctatttaagttgctcaaaaaacttaagtgataattacttcacttttgtaattatttgaaagctaaagactggtaaaggaaaatatactagacggacagtattatgatctcttcctagaatagaactcttagctagaatagctaagagtaggtacctactcagtgccagcctggtgctccttgtttcacttgtgaaggcagcagagtcataccagggcagcagtggacagtatttctattcaaattgggatatgtatgattgtatttatagaatttcattcaccccacaaagcaaagtttatctacaccagatatcaggaacacccagcctgcagatgttctacctgtgtactttacttgcataagttacttgaaaagccttcattacccaacctgcctgtcgtatcaacatattaataaccgaattaagaatactacaaaggctcttaaaactccatatcagaatataaaaatttgtataacaatgtacatattacagtatttaattgagcaaaaccaaacaaataatacatttttcttttagatatcaaagaagaagtgtggataggccttaagaacataaacataccaactttatttcagtggtcagatggtactgaagttactctaacatattgggatgagaatgagccaaatgttccctacaataagacgcccaactgtgtttcctacttaggagaggtacgaaacctcctgtggtttctttatattcttcctgttttacctaatgataatattaagacttctttggttgggaagtttgcgtataagctggaaaataaaaggtaagagcactctggatcagggtacagagccacggaccattacctgttaagaattgggccgcacagcaggaggtgagcggcgggtaagcaagcattactgcctgaactccgcctcctgtcagattggcagcagcattagattctcctaggagggtgaaccctattatgaactgcacatgcaagggatctaggttgcacttccttgtggaacagtttcatcccaaaactatcctcttccccaccctctgtggaaaaaattgtcttccacaaaactggtccctggtgtcaaaggttggcaacaaataatctaaagtctagactgtctttctggtagctactttaaaaaggtaaataaaagcaattactaaataagcaacccatatcctatctgagagcatcttttctggtctcaaacagatacagagaatccctttagaactcacattcttgtgctgactgattctagcaacctgctttctctcaggaccagggcctgcacccacctttctgccatcagtgtgatattcggcagatagccacaatttaacctgaaaaatcccatcttccaaattcatgttcagattgttttatatcgatactactttgagaagtaaaaaaatggttttatttaaaaactaggcctaacatttttcagaaaccaccttactcctatagaatgcttaaacattttttgaacatcttttacttaataatccaaaataggctgtgtcttgagcagaaaagatatatgtacctctacgttttgtttgtatcactttcctgtggacccctaattggttatgaaagtgactgtgtcactcagacatctaaagagacttaagtggaagcaataaatattatgtgtatttaaaagaagtttagaaaggtgtcacatttgatgctctatttaaaaggacatccaacatgtctttagaagaacatcagaaatggaaaagtgttcccatgggcaagagtgaattgatggcatacctagacagcattccaatgttcaaaactgacccttatcacaatcgacttattagaatttaattcaaacaaagcaaagtgacgtagtcaattaagcaaattaatgttaagtagcatatatgaaagagagaattttgaagtccagattgaagtagagttgaaagaaacttttgacctagaattcatggagaatagctattttagccaccatcatcattttacacgtgaggaaaccgagaaagggaggttgatgatgtacctaaaagtttcaaactttggctatgccattctagtctagaagactagaatgctggaactgtgggctgagttcttctctcttcaacttttatactaagtgtgctttgatggttttattgctactcttataagaaaatgaaatttatccacactgtgacctggaggtgatgctgaggtaactggctgtgagccatcactttgcaggcctgttgagtagcattttctaggagtgtgttctcacatttgataattcacttatattcatttctctctctctgtctctgtcatagtttttgtgagttcagttctgaatatgcggtaaataatttcctttccaagcaaatgtttttgtctcctttcaaagctaggtcagtggaaagtccaatcatgtgaggagaaactaaaatatgtatgcaagagaaagggagaaaaactgaatgacgcaagttctgataagatgtgtcctccagatgaggtaggtaaaatccctatgtaaattttctcaagcagtattacaacttcttggttagaaatggtagctgagacttaaataactcagacttataaaatagaggaaactactagcttctgttcatttaagttagaacaagccagaaggcagtgagtcatagcatattggccttcttacagaagcagaaacttgaaaatttctataaatatttgtagaattactatcctcaaggctgatgtctttacttcccccactaatatcaatattcaaaaataattcatccagtgaatattatactcttatgatgagccagccacccatatgagaagtaacccatactttttgtctgacacaggcccacagtcttgtggaggttatctgtgaaattgcatcccaccctcatcacatgtatgatttcaatagccatgtcctcaatttccacaagttctaagacgttatcaatgtagcagaaacatgcttgccagacgggacaccatcaagtctggaaaagagtttgacaatatttttcctctgacttagggctggaagagacatggagaaacctgttacaagatttatgaggatgaggtcccttttggaacaaactgcaatctgactatcactagcaggtgtgaccatcagtaaacttgtactcataaactttcaactctgaattcttttgccaaacagtcttcctaagtaaaaggtgcatcttcaaatagagtcaatcattgtgaaacacttgccaatttgattctccttttgtagatttgagcaagaatacctaaatgatttgatgaaaaagtatgataaatctctaagaaaatacttctggactggcctgagagatgtagattcttgtggagagtataactgggcaactgttggtggaagaaggcgggctgtaaccttttccaactggaattttcttgagccaggtgagtgtcttaatctttgaagtagtagtatactgtgactagtgaaaggcagcactcctcccaaagatgttcctcacttacttttgaaatgtgagggacatgatgatcttcaggattggagtctatctatggaaccataaatagaagcagtggctatgtcttccctattatgtccttgggaataatccaatgaaagaaattcaaaaacttagttctcccaaaccaccatctaatggctcagagctagaagcaccagtgtgagtttttaaaatcttttccatgtaaatctcaaatagaatctagaagctcccgtgtgaggctctttacattttcatctctctgcttcttaacctattttcaaaactgaatgtgttttcttccattattctcaatgggtaagaattatggaggctatcttgtattatttattttgtttttgtttttgtttttgttttgagatggggtctcactctgttgcccaggctggaatgcagtggtgtgatctcggctcactgcaacctctgcctcccaggttcaagtgattcttctgcctcagcctcccaagtagctgggattacaggtgcatgccaacatgcccagctactttttgtatttctgtagagatggggttttaacatgttggccaggctggtctcgatctcctgaccccaagtaatccatctgcctcagcctcccaaagtgctgggattacaggtgtgagccactgtgcctggcttcttatttattttgaaagttatttcctctttctccaaccagcctaaagcattgaccataatttgccatagaatcagaacacttaagccggaaaggacctcagaaatacttttagagttaagaaaacagagactttaaaaggtgatttacttgacaaagatcatctggttattgaattaatgaaatccagagttcctgatttttaagccagtggctttgaataagacagcagtataaagcattctacttttcaccctgtgaattatttatattttattgtgttggtctaatgtgatcatgaagactattttttataacacagagattggaaaatatgagcttacaattgaacatgttatttgaaatagaaaatgcccacaaaagttaggacacatggtcatcaccatcaacatgagtgatgttgctagtaacaaagtcatccttttatgtctgaaaaagatagagtatacagatgttgatcctggttaaatctcagattaagaacactctaatggataaagcacatagatttctttttttctttttcttttttctttttttttttttttttttttttttgagatggagtttcgctcctcttgcccaggctggagtgcaatggctcgatctcggctcactgtaacctctgcctcccgtgtacaaacaattctcctgcctcagcctcccaagtagctgggattacaggcacctgccaccatgcccagctaattttttttgtatttttagtagagacggagtttcaccattttggccaggctggtctcgaactcctgacctcaggtgatctacccacctcagcctccgaaagtgctgggattacaggcgtgagccaccgtgcctggccagatttgttttatagacactaagagtaaaggtgacgttcttgataactaagtcttggtggttggagaggtgcttgggaagtagctaccatgactacttcctccattctatgaccagaaaggctatgtgaagctctctttaccattattgcacccatcctcagccaacttggtctatcatgggcacaccgtggatagaaggactgaacagggaaaaatagcacacccattcagggtagcaaggcaattatttttcccagtttcttattcctcttgctgtttgtgtatatgagactatgtggcttctctgtttggtgggatagaagttgtcctattacttttcagtatatgtaactcttcttgtcttttacctgcttcaggcagtgtgatgtaatggaaaatggaacatgatgttttgtcagacaaatctggtttcaaccccaactctaccattcactaactctgactgtgggcaagttacttagtcttcatttacaaaatggaactgataattcaaactaccttttaatactgttatgaatacataaaattatgactgtcataaaattaacggtaaacaaatgtatgttaccacatacctccttctacctttattgtaccagcttttcctttggatcagaatctgggagagttgtgttttgaggttaactaagtttcttaaaaactgctcaaagtttttaagctaatttgaaccactatcctaagcagcagtagtatttagggtacagctctagaaacagaccacctgggcacaaatcctggggcaaccacttactaattctatgaccttgaacaagtcacttcattctcactgtacctcaaattatgacaatagaatccccccataggtttgttatgaggattaatctttttcaaaaagtactttacaaataataaacacctgtcattattattctgaacaacatatttctttcctctctttgttccattttttttttattctctctccccaacttggctgaagtaaagagtagaaacactagaaaatgtttgaactttaacgttttaatttttaattgagctttccacttcaatcccagcttccccgggcggctgcgtggctatgtctactggaaagtctgttggaaagtgggaggtgaaggactgcagaagcttcaaagcactttcaatttgcaagaaaatgagtggaccccttgggcctgaagaagcatcccctaagcctgatgacccctgtcctgaaggctggcagagtttccccgcaagtctttcttgttataaggtaaagtgacattctcattctatccttcaatgaagttatttttccactacccttgttcatgtccttgtacaaattatgctcttctccatagtactatgtaacctaactaaagtgctctggagcacagagtccttggcagggcatcgctgaacctctggtgtgaggtgcctcagccccacaccctgcacgtgtcctacctgaaagggcaggcccaaagccagaagtggctccaccccaaggtctttttttcccagtaagttggtgtactatatgccatactgccactatgcctatgatcctcatattcctctaattcttgttgtcaaattaacagctccagcactcctaataatgtaaaaaaagtgtatatatatttacacttttacaaacatatatatatttgtgtgtatatatacaaatatatatatttatatatacaatatatatatttataaacatatttacaatatatatattataaatatatttataaatatatttacaatatatatatttataaatatatttataaaatatatatgtttatatatttacaaaatatatatgtatatatatttacaaaatatatatatatttacatatatttacaaaatatatatatttacataaatttacaaaatatatatatttacatatatttacaaaatatatatatttacatatatttacaaaatatatatatttacatatatttacaaaatatatatatttacatatatttacaaaatatatatatttacatatatttacaaaatatatatatatttacaaaatatatatatttacatatatttactatatatatatttacaaaatatatatatttatatatatttacaaaatatgtacatatttatatagatttacaaaatatgtacatatttatatagatttacaaaatatgtacatatttatatagatttacaaaatatgtacatatttatatagatttacaaaatatgtatatatttatatagatttacaaaatatgtatatatttatatagatttacaaaatatgtatatatttatatagatttacaaaatatgtatatatttatatagatttacaaaatatgtatatatttatatagatttacaaaacatatatatatttatatatttacaaaacatatatttacaatatatttatatatatttacaatatatatatttacaatatatatatttacaatatatttatatatatttactatatatatttacaatatatttatatatatttacaatatatatacgtttatatatatttacaaaatatatatacgtttatatatttacaaaatatatatacgtttatatatttacaaaatatatacgtttatatatttttacaaaatatatacgtttatatgtatttttacaaaatatatacgtttatatgtatttttacaaaatatatacgtttatatgtatttttacaaaatatatacgtttatatgtatttttacaaaatatatacgtttatatgtatttttacaaaatatatacgtttatatgtatttttacaaaatatatacgtttatatgtatttttacaaaatatatacgtttatatgtatttttacaaaatatatacgtttatatgtatttttactatatgtatatatttatgtatatttttacaaaatgtatatatttatgtatatttttacaaaatgtatatatttatgtgtatttttattatatgtatatatatttatatatatatttggtctgcatcagtcagctagttccataaacaaaccactagatgccatcccaaaattcggtggctatgacaacaaacatttagcctcacattctcacagatcttcaggccagctagagtttgactgatctagtttgggcttgaatggtgacctctgctcccaacttcaggtcagctgtgctgggctccagcccttccttctagagctcaggctaaaagggcaacagctcacaggggtttgttgttctcatggtatatcactggagcccaagaaggcaagccaaccatataagcacatttcaggcctctgctcagtttaccttcactaatatcccatcaacacagtaagtcatatggccaagccccatgccaaggtacaaagacgtatactccgcccaccagggggctgtggcaagaccatctaattatattacaaggaactgaagaattgggacaaatataattcatcctgtcattgtgtcatcatctcttcttcctcctctgcctcctcctcctcctctttttcttctttcttctttcttctttcttcttctttctttttctcctttcttcttcttttgaaacagcccaagttccaggtttacttttgccactttctgtcaatattcacacaccagtgcagactgctctttggttgttcctcgtcagaaaatagtgctatttttgtgtgggtcactgtgtcttatattcgaaatttctattgttagcacatttctttgccaaaggctactcccaaagcatttatatgtatcctttacagccttgcctcctggttcattttatctttcaaggtcctaggaatacaggagaacgtggatcttgttggaatagttccccagcctggctgaggaaggccatccatctgaccacaaggactggcatctgtgctggcctttagttgaattgacactttcagcaggacctgtctgtgtctcagtatatgtgcatttacctatgccttcactacacctttaagaattcatttcaggggcccacacatgtgacagtaattgactttagcactatgaaatactttatgataataccataaaacaaattaatattatattttgctaaggtattccatgcagaaagaattgtaagaaagaggaactgggaagaagctgaacgattctgccaagcccttggagcacacctttctagcttcagccatgtggatgaaataaaggaatttcttcactttttaacggaccagttcaggtaatactttaagaatgagaatttctatgctgaatttgatgtcctctagatattcaaaattgacatgttcttaccctcactctctgttggaaaaaaaatggacatgttttattatctaaaaggtcatttggtgcttagcagtcatggaacattaagcactcttaatgtgcagacactatgaggaatctaaaaatgaatgagatgtattccctaccctttgtttaataaagtccaacagcaatgtatggcagaaaatctagaatataggcaaggaagggccttgggaattcagaggagggagggagtgtttctgggagtataatcaggaaaaatgtcataaagaaggctgattcttggaaggtaggtattatttcaaaaggcaagataggagaaggagaaggagccagaaaaaaaacagaacataagcaaaggaactaagaccagaatatacagatatggtcaaggagaaatgagtcatacaaattagctagaaaatggaatttggatatgaaattggaatgtccttgtttgcaagggaaggagtttgatcttaagtaattaaacacaaccaaacaaaaaacaaaaacaaggtgcgtgtgtgtgtatttatatctacacacactcacatatacctgcatatatacatatatacacagagaggaaggggttggccaggctggtctcgaacttctgacctcaggtgatctgcccacctcagcctcccaaagtactgggattacaggcattagccaccacacccagcccattatcagttttgattaagtgtgagtctgcaaatttgttcaataataataaagtccaattctgcacttttgaaagagacttaaaacaaagcttgccaattagtacttatccagctctaagactataatgttcttttcctgggaggaaggggccacaaaatactacaaaattgtgaaattctaataaaaatccttaaaaatttaaaaattttttaaattttttaattttaaaaattaaagcaactagcaacattttcattgtgcaacagataaaagttagtgctgagtagctggtggcctcctgaaatggggcctgactctccaatttgccaggtctctaatttattacttcttgaccccacttcacttgcttatgttatgtgcttgtcttatatttactcaaatagcaattgagttaataatcacaagtcatgtgatcatcttaataggtactgaaaatgcattgggtaaaatccactattcattcctggtttaatacataaatatacacttatatttagtaaatataactaatatgtaaattcttatttgaatagaagaatagctcaaattaatagccatatcacacttaatgatgaagcattgttaagtgcatttccctgaaagtcagaaaaaggtaagtatccctatatcatcactattgttaatcttggtttgaaattcaactcctgcacattaagataaaaacaatactataatgtgtaaatgtttatatatattaagcagaggaaaagacagattatcaaagagtaaaaaatatactatttacatttaaaactagactgcaaaaagggtaatggctattatatctctaggaagtaagattttgagtgatttttaaagtcttttctatgggctgggtgtggtggcttatgcctgtaatcccagcactttgggggcctgaggtgagaggattgcttgaaaccaggagttcgagaccagcctgggtagcatagggagaccctatctctatttaaaaaaaaaaaaaaaagaattagctgggcatggtggcacacacctgtagtcctggttactcaggaggctgagtcaggaggatcacttgagcccaggagttcaaggatacagtgagacaagatagtgccactgcactccagcttgggcaacagagtgagatgctgtctgtaaaaaataaatgaatagaatgttttctttgaaaatttctatattttccagatttgctttttgttttgttttttgagacagtcttgttttgtcactcaggctgaggtacagtggcatgattacagctcactgcagcctcaacctcccagactcaggtaatccccccacttcagcctcccaagtagctgggactacaatcacatgccaccacacccagctaatgtttgtatttttttgtagaaacgggtttttccatgttgcccaggctaatctcagattcctggctcaagcgattcaccttccttggcctcccaaggtgctgggatcacagatgtgagccacagtgcctggcccagatttgctctaatatagcttctgctgtgtttttctcattagagaatgtagtttcactacagtgtactgggaatctaatgcaaaatatgatacctgtgttccataaatatttatttattaagcatctatcgtagaatctcaggtattctagacatcattgtccagtgttagaaattaatatacaaaatttcactgcagactgacccaaggcaatttgtatatactaaatactaactcttgggttctttgtgaggtgagtgttagctattccctcaaccttgagaatagattataacaaatgcaaaattcagaccaaaattttccacacatacagacatttgctatgcaaacattcattgaagcagacacaaaacattttatacaacgtgttttgtaagcttgacaacattccagcaatctgtcctttttggtgttttaactatcaccttgcacagatttacttgaagcagatgtggcagtgttctgtggcagcattctgttcccattgtagtgagtatcaggccatcacaatcacctgacccaatgactggatgtggggttgtttcgaatcaagccctactaagatacaggctgcggcctcgcaagattctaatacactcttgagaagtgtgagagtttctctaaatattttagctaatccctgcatctcaaataacttatatttcaccagtgagagcccaatcctaccatcatgctgatgaacaagcttccgatttcactgacattaacccagttctcacattcattctgctcatgaccaaagcctccagtgtgactttggtgatcatggaagtcctcatggtggccacctctggaccatggcctttctttttcttttttttttttattattatactttaagttctagggtacatgtgcacaacatgctggtttgttacgtatgtatacatgtgccatgttggtttgctgcacccattagctcgtcatttacattaggtatttctcctaatgctatccctcccccatcactctgccccacaacaggtcccggtgtgtgatgttccccgccctgtgtccaagtgttctcattgttcaattcccacctgtgagtgagaacatgcggtgtttggttttctgtccttgcgatagtttgctcagaatgatggtttccagcttcatccgtgtccctacaaaggacatgaactcatccttttttatggctgcatagtattccatggtgtatatgtgtggggcatggcctttcaaatacaccaccaatacttcctgacatgtaagtttcaagcagggcaacttaatggcccttagatttcaagcttgacacacacaatatcatattatccagataaagtatttttaagtaaaatgctgacataagctctagattccaagcaagaggttagtaactctaactggaacgaggagccatggataagtactaatgaatgaggttgtagatatttgtgagaaacaataagtagaaaacattggaatatcatatgtgatagaaatgaccattaagagcatccatatacagaacgaattacactaggaaacaaaacatgaaaggaaatttttatgatttgtttctttgttttgaatcacacttgttgagcactcccttctttaaaaaattaatacaagttcattatataaaatttggaaaatataaaaatgagtaatgaagcaaacaatcacctcaaatcctagctcctgattataaacatagtaaacccttagtgtaaaccctttctgtttacttacatctctacacatttagcttttacaaaacctattttccatagaatgtactatgtttaatttttttctaatcataaaagtaatgcacattgaatttagaaaacagaacagcacagagaaaaaacaaatctccttaatcccttcacttataggaactgtattttatttgtactctgatcctagcagttaacacaatgccatggtaagcagactgctttgtttgcttaataacttctccataataaagaaattgtttgcctgtgctgtgcttagagaacatattctaaaaccaaaattgtaaccatggcttaaaggaaagaaggaagcaaacccatttatattagaaaatgattctaaagcatactccttgaatgccttggctttttattgcaggaattgacctttctcagcaagatatccattgcccaaattgtgtattgcatgccaaggagttaagtcagattactgctgtacctctcacaatctaagttccacatctctatttgtatttcagtgaaaaggattcatggtgcaccaaatcattaaggctctgagatctttgcaactcttaatggcagcccaacagggacagccactgtagggcaaaaatagccataggattagagaagaaagccttgtttgcaatgccattgctgctgtgtacactaccccctgtgatgtggcaagaatggatttagacataaatctaaggctttgtagaataagcaccctcatcaaatagtatttattggggcttatggctgagatactgttttccttagcaaccaaatgcagcaggaaatttgattgagaataggaattttaacacaattacacatattaaccttttacgctatctcttcttaacccaatagttttaaaaccatatacttagtgcttggagtaccaggaacttataaagagagagagggaatctcagtttgacttgattccccagttatgatcaggtgcaattttttccttcacattttctaaaatcaacattggaagtgtgcaatgatcaatgtgatatccaatttcttcttccctttatctgcctacagctaaactaggccaaaccaggaatgagttacaattgaggaaatattttccacttctgatcccgcacaaaaaaaatacatacatgtcgctattattttctgtatttatgacatgctagtgagttctttaaaatgaagctgaaatctgtaaatttctgtgttcaaatgaaacttttttcaatctgtaaatttctgtgttcaaatgaaacatttctgaaatacagtttcagaaagtagtggagattagaaattttggacaatcgagcaaactcttttctgtaggaagctgtcctctgaggtgcagcaaaggagccagaaatgggcttgaaagcagagatgtttctaagtggaaggaaggggagctattagctgagagaagactgggtaagggcttgaggagcctagaaagttgaggatgaacctctaaaaaggctaccagtgggagcctctacaatgcaggtgacaaatgatctttgatcgtcttcctggttgtattgtggattgtgtaaagaagataaaatagctaatgcttactttagggaaacacaaaattctacacgaattccccaggcccaaatatataatgtgcaaagatttgggagaaatgcagttatttccccaagtaaatatgaggaagaaaacttaactgcctctctattttagccgtctggctttaattgtgctgtgtatgccaattgtctagaccctgtggtttagaaatccagcactcgggcagtatgatacactcggaagcctgtaagagagctccgatgagctgaaggcataaactgcaaattcctcttgtagctactaaatttaaactggatttaattgtctccactggatatatcttaggtccacaaattggtggatctgtctctatgaaagaaaacaagataacaataaaaaccaaaacaggacagtcctcattcatattccattgcattaagtccaaaagccttgaggttgaaaagatgaaaaagtacttattgttgttaaaatatgagggaatgttgaacaaaggtaagaaataaagaaaagcaattatttattaaaaaataagaaatcagtttaaaattctttgtttcagcctttgattcactagtacattttattaaaatgcacttatatttctctgtagacttgtagctatatgttccatatattctgctgaacttgagagtatgcattgtttttagatttggaatctaccccttctctaaaatgtatctgtattacacttacaggcatattacatttatatatatgtatacacacatatgtactgatcatacataccatgtaccaacaaaaggttaaattatgtggaatattattggtcgcctaaaagtgtaataaattttagaaaacattttcaaatggagttagaggcagagaaaattttctgtgcttatattacatctacttatgctggatatttatccctggccagagcataaatgtatttgaggggaaaggattacttagacatatgttcctgcctccatattgcttgtgtagatagtcttccttggaaggcctacccttcttcctcttggccaatctgaatactggcattcagatcatgactagaaagaaatgttagccatcccttgaagaatatcttttgtcctaccaacctcacaaagtctttcttcattttctgcagtccgcagtgacctctcctttctctgaacttttgtgtcacctaaaatgtatataactcatttgatagctttcataaatggtctttacttttttgttcatatatatcttatctctctatttcatattacatttcagggtagatgtaggtcttatacttctctgtgtcatcattgcacctagctcaatgccttttacataaaagtataatacttataggtgataagtataatcacttaaattattgcttaatttatttttctggtatatttctttggcacataggcaatactcaaatgcttgtttaaacttagtggatagtaggaactcaactatgtttcaaatattgtttaacaaaaatttagccaaatagttctgcattttaaagaagaatatttgatagtgttatagacaaacactttaaagaaatgccattgttgcctttgactgtatctgaaagtattgtttaatattcaagcactacagtaaaagtcttggaataatttccatttttttcctcttaaaattcaaagtagaatggtttttgcctttcatatgaagaaaacagcttaatatgtagttttaaaagtatggtactttttctgtaactaccccacattaagggcttagtttcatttcaaaagacttctttatgttgcttgaaactgtgcttttcaattagtgatgcacattagacatgtgagtgctaaatatttttgccaagcattgtcctgtatttttaacacttgctttttacatagtggccagcattggctgtggattggtttgaataaaaggagcccagatttacaaggatcctggcaatggagtgatcgtacaccagtaagttaaaacgttattgttttaggtagtatggaaacactgtttgtttcaataacaagttgattgttaaataatacattgacacctaaaatttatatggaaccacaaaagaccctgaatagccaaagaaatcttgagcaaaaagaataaagctggaggccatcacactacctgagcttgaagatacacctcaaagctatagtaaccaaaacagcatggtactggcataaaaacagacacttagaccaacggaacagaatagagaggccaaaaatacatccatatatttatagccaactggttttcaacaaagataccaagagcacacaatgagaaaaggacagtctcttctataaatgatagtaggaaaactggatttccacatgcagaaaaatgagattaaacccttatctcataccatatacaaaaatcaactccaaatgaattaaagccctaaatggtaggccccaaactatgaaactactaggagaaaacacagggggaaagctccatgacattggtctggacaaggatttttttggatacgaactcaaaaacacagacaacaaaaaccaaaatagacaaatgggattacatcagactaaaaagcttctgcacaataaaggaaacaatcaacagagtgaagagacaacccacagaataagagaaaatatttgcaaattatcatctgattaaaggttaatatccaaaatacagtcgtacatcacttaacaatgggatacattttgagaaatgcattgttagttaggcagtgtttttgtgcaaacatcatagaacatacttaaacaaatctagatggtacagcctacttcacacataggctacacatctaggctttatattgctcctaggctacaaacctgttgaacatgttactgtactgactactatagggatttgtaacacaatgataacatagaaaaggtacagtaaagatataatctcgtgggaacacatcttcaagggatggctaacatttctttctagccatgatctgaatgccagtattcacactggccaagaggaggaaggataggccttccaaggaagactatctacacaagcatatggaggcaggaacatacatgtaggccatctgtggttgactgaaaggccattatgcaatgcatgactgtagataaggaactcaaacaactcaatagcaagaaaacaatctgattttaaaatggccaaatgactgaatagacatttctcaaaagaagacatacagatggccaacagtcataggaaaaaatgctcaacatcactaatcatcagggaaatgcacattaaaaccatagtaagttatcacctcccacctctcagaatgattattataaaaaagacaaaagatacatgttggtaaggatgtggagaagagggagcttttgcacactgttggtgggaatgtaaattagtacaaccattattgaaaacactatgaaggtccctcaaaaaattaaaaatagaactaaccacatgaacagcaatcccactactgggcatatattcagaggaagtgaaatgagaatgtttaagatactcggagggtgactgcagcactattcatggtagccaagataggaaatcaacctaagtgtccatcaacagatgaatggatgaagcaagtatggtacatgtacacaatggagtactactcagccataaaagggaaggaaatcctgccgtttgtgacaacatgggtgaccctggaggacattatgttaaatgaaagaagccaggcacagaaagacaaatgccacgtgatatcactgagatgtggaatttaaaaaaaaaaaaaaaggatctcatagagctaaagaatagaatggtggtttccaagagctggggcagatgaggtgggggactggggagatgttggtcaaaggatacaaaatttcatttagataggaagaataagttcaagagatctattgtacaacaagttggttatagttaatattttatattcttgaaaaatgctaaaagtagatgttaagtgttctcaccacagaaataactgtgtgagataatgcatttgttaattagctaaatttagtcagtccacaatgtatatatacttcaaaacatcatgttgtatatgataaatgcatatacttttatctgccaatttaaaaaataaaataaatacattcacgtatcatacaaccattaaaattatgtgtctttattgaaatgaaaatagagtctcatataggcagtaaggaaaagacaagttacaagtcttctttttatttttaaaaacccatatgtatagtctctctatatatagtcaaaaaattgtaaagctataaatatagtagtcatctttgggtagtatgagtgatttttttctttttgaaatggggtcttactctgccacccagggtgaagtgcagtgctgcgatctcaactcactacaaccttcacctcccaggctcaagcgatcttcccacctagcctccccagtagctgagaccacagatgcatgccatcacgcccggctaattttttttttttttttttgagacgtagtctcactctgtcgcccaggctagagtgcagtcgtgcaatctctgctcactgcaagctccgcctcccgggttcacaccattctcctgcctcagcctcctgagtggctgggacttcaggcatgtgccaccacgcccaactaattttttagtagagatggggtttcaccatattggccagggtgatctctaactcctgaccctgtgatccacccgcctcagcctcccaaagtgctgggattacaggtgtgagctaccgtgcccttccacgcccagctaattcttatatttttttgtagagatagggtttcaccatgttgcccaggctggtctcaaactcctgagctcaggcagtctacccatcttagcctcccaaagtgttggaattacaggtgtgagccacatctggccacaagtgattgttttcaaagctttctctttatactgtttattttcatttttatagtaagaagcttttctttttattatctaaatatggaagagttatacaaaaaataaaatatctttttctggggggactaggtggggatgacagagtctcactgtgtcacccaggctagaatacagtggtgccagtatgactcactgcagcctcaacctcctgggttcaattgatcctcatgtctcagcctctcaagtacaggcacatgccaccacatccagctaatttttgtattttttgtagagatggggtttcaccatgttgcccaggctggtctcgaattcctgggctcaagccatctgccaaccttggcctcccaaagtgctgggattaccagcatgagtcactgtgcctggccaaaagtatccttattggaggaaattatttgtttggagaaacctctagaaaatccttgctattattccacatttatattataaggatatattagtgtaatagttataggagcaaaattattctcagatattcaatatttactccaatttttgtcaccaaaaattggtgactccaatgtcacctccttttttattctttctaaatgtaaaactccttgagtttattttcaaattggagcatatctgagattagttaatcaaataatgagcatttcaacacatgcaaaaaaagaaaaaagtattttgcaaacctgattctctatgactccagcggcgaacttaatacactattaacttccacttctgaaactgtggcttcctttgtttggaaacttatgacattatgacatttgctaagtcctctcatgatttagcatcatgatataaaaaagagatggaaaagttttctttctgtggcatatcaacgcacttgagtgattaaggctgcctaaattacatctaaattgcaaatatttatacatcagtcttaaattctcaagcctctcttgtcttttcaggtgtctactattatcatgccaaatgagtttcagcaggattatgacatcagagactgtgctgctgtcaaggtcagtacaatgctggaaaatctgcatatttaaaacataagtccatcatcatatgcagtcaagtaacagatccatggagtgtctttttatgtgaagcatgatgttagatgcagtgagagataagcacacccatggcctggccctcagcagcctaacttacacttcatttgagaggataaaattcatattcaagaaaacctctctcattaccacgcagtaatatgctccaaatgagggggctgaggaaggctaatgaaattcagaggagaaagtgagtcccatggccatttcccaggaagaggtgggacttgaactgggactttaaggatggatagagtttctacaaatgggatagggtaaggttttttcatgaggggatggtatgagaaagtggtataaaataaggtggaagtggaagagggcagtggagaacagaatacagatcaagaagtttcattggtgctgtccttgataacagtattaggaaatcagattgatgccactttaaggaatttctacacttcttgataggcaacagggcattttttaaagtttctgagtagggagggtcacatgaactaaggagggtatgaggaagattcatcttgagacagatgtcaaaagcaacaggtaagattggaaggcatagaagaccagtgaggcatcttcctttgcagaatgcattcatgtatccatttcataaacagtccaaggagtcagtgaggcactgggtgatagaacaatgacaaggtacaaagcatagccattgtcttcacaaaactaaagtctagtaggaaataaagacaagtaaacaagcaattacaacaccactgagtaaagactatgacatgcgaaatacaagttttatgcaagaacaagaatattatgaaagaataataaggatggtgatggtgatggtccatggtggtggtgatgatgatgatggagcagctaacactgattaactcctttatgagccagccactatactaggcatgtcacatatgtcacatagcacataagcaatcttgtgaggtaggcactgttactgtattcatctcacatggaaatttgagctgtgagtaatttaccccagcttacatggagtaaatttaaactgaaagaactgaaatttacacccatgtgtgtctgggtctggtactcttaaccactatgctatatgactaggcatttatagaaatagaaagggtattgatttatgagaaaattgtatgttttagttcagatattttgaatccaagctagctataagatgtatgctatggtaagttgagatcaagagtcttgagttgaaaggaaaatgtatatttttaaaaaaagggccaagaagtggatttggaggaactgccaatatatagagtgaaaaaagatgaagatggaggagacatcagttaatatctttgatttgtagtccaagaaagagattcaacaaggtggctgaccagaaatgttacaggaaggctgagggatataagaactgacaaaaccacaggaaagcactgttttcaaagtaactcttctagtaataaactgtgtagtacatgtcatttttatagaattcccaatgtaacacaggaaaaggtgaaaacttcagagaagcttatggaatttttagtagtgttgagaacactggtacaataaactgtgttctagggaaatagagttgccaagtatggagagatttgaaaatctaccaaataaataaagagatactaatgcaacctgcatcaggaacaagcccagccagggcagtgttctgtaaggaaaatcttacctcacctgccacagaacccccagaaacttggtcttaagagaaaatagtctaagaagtgatggatgtctctcccaagtaatgccttcccctatcctttttatcctacttgctgactggaatttgtaatgagccatcctggaccatgtggagaagggcaaaatcctagaaatggcatggtaacaccagagaaggagcctgagccactgaggctggacctttatgtcgctttctgatctaatttgatcacagcttggtgcttggatacctctgaaataaatattctaacaaaaattgtcaggtgtgggggagaaaatttgcattttggacataaacatgactttacaacatatttcctttgttagcccctttgagggctcttgctcagggtattactgtttaaatattccattaattcatgtgttcatttatcgaacaaatatcttaggtgctagagctaaaatagagatcaaagtcatagggcttacagtttagtgttccataagggatgtatcaacttcaaaatattctgcaatacttttcctcttataggtatttcataggccatggcgaagaggctggcatttctatgatgatagagaatttatttatttgaggccttttgcttgtgatacaaaacttgaatgggtgtgccaaattccaaaaggtaagtggtagttattccttttcacaaccttctcatgttaacattgtgaatgcctagctcaaagtagctaggggagcattttgatctataattctgatgtctaaaagcctatgatgatgatgcaattaatatgtggagcaccccctgcctgactccggcttctaatagaaggctagcttattgaaatttagtgatatcttactctttgatcatggaagaatttgcatagaagataaaatgtgaggctcattcagggagattagattttggatgaaatattattttaagcaaaaggagaaatgcagaatcattttcgtttttattttgatgcaaaatgaaaaaataaagataatcttgggaagaataaggcagaagtcaagaaataaaaatttggcaggtccctgtaaaatttagaagcaattttcaatgaactataaaactgctaatactttatataaattcaaatttgagaagccagttagattgatagtatagcctttgataacagaagggagagtggggagaaatgtagataccattttactttactttttccaggaaaacatgaaatattaagaaaaatgttaagactttaattctcaaattattattattattttttaagacagtcttgctcagtcttccaggctggagtgcagtagcacaatcttggctcactgcagcctctgcctcccaggttcaagtgattctcctgcctcagccactggcgtagctgggactacaggcacccactaccgcacctagccaatttttgtattttcagtagagtcagggtttcaccatgttggccaagctggtctcgaactcctgacctcaggtgattggcccgcctcagcctcccaaagtgctagaattacaggcatgagccactgcacccagcctcaaattatttttaagcagagattggctgtatgaaattaattagcagaaaacccatagaaggtttttaaagaaatctctgaactgaatgtaaacagatcattgaaactaaaggtatatcctcctacaagttctcaaagaacccaaagttcacatcatggaactgcctattagaagattgttattcctaaaatagttaaaagagcttcagatgtgacatcaggtagtagcaaatctctttcacaaaggcaaactgtcaaaccagttgtaagggaaagacagttgtgttgatgggtttttctaaaggataaattatgcctaagttattcttgattattttattaaacccaaaaaagggacaaaggaaaaccagtttggatatcctttaaacaagtggaaaagtaacttgtatataattaattcggacaatgtctctgttttgaagtgttaatgtgagcctcccattactctctggcatttgttagcattccacagacagtgtcattgttccaaccaaagtgccctcgatgggagctgctgcccccacctcctgtttgagcagtggagcagaccccagagtttaaacaagggcaaccttagaaatggcaaattagccaccagaggaaatagtatgaagggcatgtggaggtgtatatatattttttttaatatatattttttaacaagagagaaaggaattaacccacttaaaaatataaatcaattaatcgaacaaatctaaataattccacctccattatccccatgcagaaataaaataaaaaactaaactcctgttctcagcctgtcccaatcacttgaagaaatcaatgattgcttgctccagggtttaaatgttatgttcacccttttttgaccgtactgtacctaactttctaagttacgatgtgatgcattcagctggttggatattttcttggttattagagcagcctaagtttactcaacttgtattcatctgtattttctggttttcttaaagaagttttcctcttatgtattctaaatcaccatgcctcttctctggctcttgcctttttattacttggttctaattaatcctctcttccctaaaagagatattttgacaacctgtaaatttgaagttacctcaaccacagtggatatttgtactttttaaatattattttttgagaaaactgtgtcaaaaataaggctcataaaagtgtttttaggaaaattacctatgatgccattacccagacatagcaatttttattgtatttcttgataccttgtacacacatacatgtttgcaatcttgtataaaaaacaccttgcatcctacttttctcactaatttaaagatatttaaaggttagccatagctttccctcccccacacacaaataatcagaagtctttgacaagattacagacaagaaactatgtacattttgaactgacttgcaacattattgttggaaattatccaatacgaatagaactggctcagagagagactaaagatgctggctattcaggcagtcctctgagtcaggtcttctgatgcctgcctgaggctcacatgccacaccaaaattaagaccagctattttactctgtaatttctaagattaagcaaatgatgtctttgacttgaagccagtgtgatctgtggccagaatgaaaagggggaggaacgcaaataggctcccatggggaacttccctgtgcctggtcctgtgctggccacttcctccagggcatcacacgtgaccttcactctctgtgagtcaggtagccatctagttttcatagaggagaaaatcaaggctcagagagggttaagccactcatccgaaataccatggcagcaaaatgcataagggcatttgcacactgacccgcccagcttccaacccggaattctgtgtagcatgccattatttactccgtttccatctgggaatcctgagtcacttttaattattttcctctcagttttgtctcatcttctcaaaaggttcaacactggagcattgtacattgtttccaaggatatcttggaagacaatgaactctatcaacctaagtttacagaacagttaacctgtttcattagatgcagaagtggttcctgaataacttcccttttcaatgaccgttattttggttcctacttcttatgcttctgtgtaacacatacaatatcattatttacttgtttttactttctaattcttagctatattttatctgtcttacttcttttgtgacctctgtgacacaaggtaaaagactgctagaaatacttcattaatatttaacgtatctgccttttggatttctcctgaagcaggtttagcatcggccctacaaaatacaactaaagtgatcaaaacgtgaagtgggttggccagaaatggacaagactcaacaatactgcaagtcctttcgagctacattaaaggccgtacttatagtataccctgatctgtcatggaatactaatgccacttgctttcttcctcatacaggccgtactccaaaaacaccagactggtacaatccaggtgagttaagaaaactgaaatttaaccaaagctgcttttaccttgtcactaatgcatttagttaattatttaagtgccagcttcttctctatacatcttcaagtgagacaaaatttctccaggcaaggaaggtgagcgactggtatgggatgaggtgatgagggtgactttttccttccctgtgagtgtaggggagtggcagagtcactggctcaggaatctcttgttccttgtagtcagtactgccccagccagagagggccggtaatctgaattactatttatagttttgaacattaactcatgcttagaggacacagtttgctttgcatagtcataattctaatctttttcttcttcttctttagaccgtgctggaattcatggacctccacttataattgaaggaagtgaatattggtttgttgctgatcttcacctaaactatgaagaagccgtcctgtactgtgccagcaatcacagctttcttgcaactataacatcttttgtgggactaaaagccatcaaaaacaaaatagcaaatgtaatttaaaagaatatattttaaatatatttcttatttttgtatttattccatttaaaaatattacaaaaattttgccaaaatctacaaaagttaaatttttctttaatgtaaaatctgcctcacagcatccaaatttgtttcatgttagaaaaattaagtagaattgcttatgttttaaaatatacaagattaataataaatgtcactttataaggtaaacatcagtagataatatagatcattctaatttcctgtcacattttttactaaaagtcaactttatagttaacttgagtttctgtttctactaataagtaactttgcaaaataatttttgggaagaaaaataatttctgtatttttaaatttataatcaattgcaataggatactgtatgcccacttaaagtattagtctaattaatatatgcccataattacagctaccatatttcctgtacccacaataggatctgtaaatatactgagaaatttcaactactctttggcaaaaggttctagtttgtataattttgaaatctaagtaaggaatgtctggaaattttagtggttagtgattatagtaagacaatgtattcgaatcaaaaccctcaagaaagctcagcacatataaggatggatgtttggcttgtttttcagatatctggtgatggacagaagtggtggataagaattagcgagtggccaatagatgatcattttacatagtaggtgacatcattgattctacctttgtaaagttatcacttaaaagaagcagttccttttactaaatggatttctatttataagtagtttgaatattaatccataaactgcctaaattagagaaaccaagcccttttgcatgttagcatcaagaaaaaaggggtatagagtaatggtattaacattaaatttagaaataaaataacttacagtaaaaagaaaaaaatggaacacctaattacattacgagttgtcaaatctgtcattttcttttagctcacgatatccatggcaccgctttcctgtgacatttggagaggaatgcttgtacatgtctgccaagacttggcttatcggtaaagttaattctaaatcctttaatgctgattatgtaatatgtgaagttcaggttcagtttctagcttaatcttgttttccttttaattatatgtttggtaatttcatcttattctgatttattattagcaacaatagctcaaattcccaatgcaaataaaggtacttttcactgtgaatattttaacttcctttatcctaaagcagttacttagtaataaacttaccactttcctaactgataagtgtctaagcaaattttcaaagataagcaggcagcagttctaaaatatagtttaagtcccctccccctgattacattgccccttcaactctcttcctacctcctgccttcaccctgggatggtatggtagtcacacaaaatgtgtgctgtttcatagacagtattggtatgctgtaacctactgataaaaataatcatagaagacagaaatggctagagaagaaagggaatatattttaagcatttaggaaagattgatttcaagagcctttctttactactgggttgcttttaaaatgtgctgacttggccgggcacggtggctcatgcctgtaatcccagcactttgggaggctgaggcaggcaaatcacttgaggcaaggagttcgagaccagcctggccaacgtggtgaatccctgtctctactaaaaatacaaaaattagccaggtgtggcagcatgcacctgcaatcccagcttcttgggaggctgaagtatgagaatcacttgaatctgggaggtggaggatgcagtaagccaacattgcaccactgcactccagccccgggcaacagagcgagactctgtctcaaaaaaaaaaaaacaaaaaaaaacacacaaaacaaaataaaaatgtactgactgaaaaattctcaccatagtaatcctggcttttcatttctcagacttaggtaaaccaacagactgtagtaccaagttgcccttcatctgtgaaaaatataatgtttcttcgttagagaaatacagcccagattctgcagctaaagtgcaatgttctgagcaatggattccttttcagaataaggtaaaaagagaattgctacattatgcaacaatgattgcttccatgctggttttatagcctatggcagaatggcaacccattagtgacaacatcactgaaatagactctgcatgtttcaggatcccacctggccctctgtgttgccagaaaccgtggatgatatcaagaattaactctcaagttggtcatgcctacaggtcttttaaagtgcagcatttctattttgttgctactaacacttaaattgcttaagttgatctgttgagggattgggatgcattgaatagtcaggactgtctctatggccttataggaaactgacttaatttctggcttgtgttttctttttcccctcaaggagagcatccaagcagcatctgccaatcaaattagaccagcatttcacaaactactttttggggactacacacatgctacaaaatgttaatcattgatcttgcctccaaatgggggttttatgattaaataggtttgagaaatgctgcattctgtatctgcctctttgagatgcataatccatgttggtatatgtatgtattaggaaatgcatttggcttctgaaaagaggttgctacagtatgagaaaagatttattctgtcacattaaagacatttgaagataagcaggtttgtgtggaaacaccatgaagtcttcaaaatcaggcttcttttggttttgctctgccatccttaatataaggcttccgagcttaaattcagggtgttctctctagggtcttttctagaagttacccgatgagtttgtccacattgggtagcttggctcattggccactccagtctataagaaagctgaaaaaaaaattttttttgtaagatatttcaaggaacacaatttgggacataccactctacactaaagtgatcataatgtgaaaaagggaaaaaagagatgtgtctgacagctgaaagcatctgtagtaaagctaggggtacattttaactttttaaaattaggacaatctttttaattcctcaaggtaatagtactgtgttaatttgcatagctgatataaatttgaattaaaatatcctgccaagaaagagatgaatttttcaacagtgtttcttgacataaggagatgatgattaaggacacagattttgaaattaggtggaacagagtacagatactgaccttactattgtgtggctatttcacttatggatgaagttatttaatgtccctgtgcctcagtttctgtctccattgtgagaattaaatgagataatactacacaaactgcttaacacataggaagcactcaataaatgagagatctttaaatatataaagatataatataaaatatatattaaagatataatatacaatatatatcttatatataagatataatatatatatatatatatatatatatgaaagtttgaagaccgctcttcagttgtttcaattgagaaggtagcttgagcctggaagctcaaggttacagtgagctatgattgcaccactgcactccggcctgtgcaacagagagagactctgtctcttaaaaaattaaataattaatgagagcataaacttgaattcttatggtactacattgcaaattaccatatctcacagaccgaaaattagcagccctctaaaagatgaagcattttacttcctatgtgagcgttcctgtgtctggaatctcatgcttcacatatgtctttgtttgcagtgttttctaaagatcaaacccgtgtctctcacattttctcaagcaagcgatacctgtcactcctatggtggcacccttccttcagtgttgagccagattgaacaaggtactggaattatttgggaaacatgttttattctgatctggggccaggttagttttaggaggctatggggaattaacatacaaaaattcttattaaacttcttttgttatggaacagataaaagactatgttgatagataaacaaaatatattcattgacatttttaatgtatctttaatttgaataaatcaaatgctttttaaaaatctctttctaacagactttattacatccttgcttccggatatggaagctactttatggattggtttgcgctggactgcctatgaaaagataaacaaatggacagataacagagagctgacgtacagtaactttcacccattattggttagtgggaggctgagaataccagaaaatgtaagtttttttaaaaaccaatactcttcatacctctgtgaaatacttgagtctttcatacatttttggactaagcaaaaccccactgtattattccatttgtatgaaatgtccagaataggcacatctaagatagtaagtaggttagtgattgctagaggctacgggggatggaaggattgagaatagtgcctaaagagtatggagtttcttttggggatggcgaaaatgttctaagatttatggggtgatggttgtgtaactctgtgaatatactaaaaactattgaatatgtactttaaatgagcgaattgtctcatatatgaattatagctcagtaaagctgttgcaagaacaacaggtgcctccccagccttctgatggatgtactggtttttcacagtagcatcagattccatagcacttatttcataaccatataaaaccatcatgtagtgagttgtaaatagaagcaaatacagatgttttgctttacattttgggactttgggctctcagcctcagtctcctgaggcaaaaagtacaaaattggtaactggtgatcatttttccccaagagctaaatatagggaagtcagagaagggaagagggcattatactgacagtagttatgctgacaccacagtattaccgcccactgcttctgttctctatactttctggatgcagattaccttttgcacaaagggcaaagattgagaaattaacataaaagtctaattccaaaagtatgtcttagacagtaatcaactgatattcctgacataatgttactttgctcaaagttgatgttggtagcaaaggaagttctcaatcgtgagtaactatgtacaatataaatatcaaattattacttggttattatagaagatgtggaagttagagtaaacgcagcaatgaaaaatgtcaaccctaatcttaagacagtttaaacttttaagcataatctatagtaagaaatacatttaaatcaccatctagtatatagatatagatataatattaattgaaacaaaagtttcaagaaacaatacttacccttataatttatgcactctgatatgttcgttctcttctattttgttccattctcctgtcttatcctatcctttactgtccaatcctactatctcctattctgttctatttcattatcacaaatacttgccaaaatccacttaagtgatttcatgatatacgaaatgagtctcaaccatatttgagccctagactagggaattacaatgagtacttgagcatcttttcttctagggcttttccatacactgttttcttgatataagtgagatcatagtatatatactattactctgcttttctcagtttgtattatatcataagtagtttcttcagccattaaaagatctacttgataagctttttaatggttgctggggaacaggtggtgtttggttacacgagtaaagtctttaatggtgatttgtgagattttggtgcacccatcacctgagcagtatacactgcactcaatttgtagtattttatccctcacccccttcccatcctttcctcctaagtcccccaaagttcattgtgtcattcttatgcctttgcatcctcatagcttagctcccacttattagtgagaacataacgatgtttggttttccattactgagttacttcacttagaataatagtctccaatctcatccaggttgctgtgaatgccattaattcattcctttttatggctgagtagtattcctccatcatatatatatacatacatacatatatatacatatacacacacacacacaccatatataaatacacaccatatatataccgtatatatggtgtgtgtatgtgtgtgtgtatatatatatatatatatatatatacacaccataatttctttatccattcattgactgatgggcatttgggttggttccacatttttataattgcgaattggattgcacaatatttcttgattgatatgccatcatttacctaaccagtgctgggtgttaggttgtttccagttttacacaatcataaatagtgctgcaatgaacacctttgtgtataatcttagcctatatttcacattacctgcagagagattttggaagtcatgtagccagatcaaaggatataggtaatataaagctctgattaccaacttgcttccagaaaggtttatgaatttacattcctattcacagcatattgtgattgtccttctatcctcaccagcatattattaatttccaacatatatcaagcagttaagatgtgccaggcactctgctaatgtatcacatacattatttcatttaatttgcccaatagctatgaaataaagatgttacccctgccccaccttagaaaagtgaagatggagtcagtaacttgccagagatcatgcagcctatgcatgcagagtcacggttgacatctggttctgggtgggcatggtggctcacgcctgtaatcccagagactctggaggctgagagggggaggcctgcttaagccctggggttcaagtctgtagtgagccatgattgcaacactgccctcccatgtgggcaacagagcaagaccctgtctctaaaaaaaattgttttaattaaaaaatgagaaaaaaggctgggcgtggtggctcatgcctgtaatcctagcactttaggaggccaaggtgggcggattgcctgagctcaggagttcgagaccagcctgggcaacacagtgaaaccccgtctctactaagaagtacaaaaaattaaccgggcatggcagtgtgggcctgtactcccagctattcaggaggctgaggcaggagaatggcttgaacctgggaggcggaagttgcagtgagctgagatcgtgtcattgcactccagcctgggcgacagagcgagattccatctccaaaaataatataaaataaaagagagagaaaataaaattgcctttaaagagcacttggtttttaaaattcttcttaatttggtagtttgatatcgtattttcattgatctttctctgatttctaatgaaaacaaacttcaataagttaaataatcattcgtagttcatcaagtgggagtgttctttttctttgcaaatttatctatcaaacccttcatgtatttcttattgattttatgactttggaaatatcaaatatgctgatcctgtatttcttgtgtttattgcaaatactttcctaagttttctttaagtctgaatgccaaaaatattacagaaataaattttgactattttttaatatgttcaaatctgtatatttcctttttatttttcctctgttgcttttaggttagaaagtccatcatgtaaattgtaaatattagttaaatatatgtccatattttcttctagttttgtttcataggttgcctttttttgttgttttttctgacacagggtcttactctgtcacccaggctggagtgtggtggtgcattcataacttactataacctgacctcaagcaatccgcctgcctgagccttccaagtagctaggactgcaggagcgcaccaccatgcgcagctacattttctaatttttttgtagagacagggtctcattgtgttgcccaggctggtctggaacccctggcttcaagtgatcctcccacatggtccttccaaagtgctgggattacaagcaggagtcaccacacccagcctctgttttttgtgtgttttttttttcccctttctgatagcatgttacatccatggtatatgatacatgttgtcagtgcatgcttaattattttccctaatcctagccacttgttctagcatcatttattacatatactttcatttgttaaaaacaatataggcctgggctagcactttgggaggctgaggcaggaggatcacttgagcccaggaatttgagaccagagaccagcctgggcaacacagcaaaaccctgtctatgtttaaaaaaaaaagagagagaaaacaatatagcaatataggatgcctcttttatcatatattaggactgtgtgtgtatgcatatatatgtgtatgtgtatatatatatactgtattttataatatttatatcagtatggtagctatttaaaaatatttctcatatacataatgtgtgtatgtgtgtatataacatacaaatacagtcagcccttcatatccatgggttctgaatctggattcgaccaactgcaggtggcaaatatttgagaaaaaaaattttttaacctacatcctcctgtatacttaaatcatctctagattacctataatagctaatacaatgtaaatgctatgtaaatagttgttatactgtattttttagggaataatgacaaaaaagtctacatgttcagtacagacaaaaaaaattttttctcaaatattttccatctgcagttggttgaatccagattcagaacccacggatatgaagggctgactgtattgatatgttatatacacacatacacatattatatatatgagaaatatttttaaatagctaccatactgatctaaatattataattttaccatatttttaaaaactataataggattaattatactttattacatgcccttaaaacatacttttagatattcttgtccatttttccaggaaaactttagaattattagtcatttttcatccaaatagttaaaattttaaaactcttgatgagaatttgactacatgtttgggagaattgacatctttctattaatcttccaattcatgaatttgatatatctatttattcaactcttcctttagatcactctgtgaagttttatagttccatctctttctcattgtcattaacaatggcaactttagctataaaaagaatggaatcatgtcctttggagcaacatggatggagctggaggccataatcctaagcaaattaacacaggaacccaaaaccaaatactgcatgttctaacgtacaagtggaggttaaacactgagcacaggggagagggagggagggggacctgggttgaaaaactacctcctgggtactgtgctcactacctgggtccaacacacccatttaacaatcctacacatgtgcccccatatctaaaataaaagctgaaatttaaaaaaaaaaaaaaaaagaatgacagctttaaaaaatttttcttactgatttgtggggaagctattgtttgaatttgttatgggtttttttttcccccataggcatctgtctcactaaaagctctttctctctgagtttttcattagattttcttgggtttcctaagtagctaataataatatacaagcaacagtgaccctcgttcctatagttacctctctcgttttcatttcatgcctcaccacatatgctagaatttccagaatttccatggcaaataccaggagcagtagtagccaccattgtagacttgatctggacctcaacaggttgttaaacattatgttgactcttggtttaagatatagcattctataactagcttgtttagaacttttaatcaggaataagtactgggttttctaaaacttgttcccagcatctgttaagattgccatatagttttttttttttttttttttaccattaggcctatttgtacgtggtatatattagtagatattgtattaaaccattttacattcttgttgtaaaatctgggtgctcagagtggattaatattttactattctgcattatatttgttagaattttacttgggaatgtgttcctctctcttcatagagtcaatttcttatgctatattgtcatatttttttctgatcatgttagcctcataaaatgactgggtagctttccatcttttctgtgttctgaaattctgactcagcttggggaattctctttccctgaaagtttgggggaactacctacaaaatgttagaacccttatccaggagcatttttgctttttaaaaaattttaattattccttatttataattgactcataataattgtaccaatttatcaggtgcagtgtgatgtttcaatgcatgcatgtgttgtataaacaatctgatcagggtaattaccatattcctcactttaaacatttatcttttctttgtaaagataacattcaaaaccttctcttctatgtgtcttgaaatatacactacattgttctttgcagagatcatactctaatgataaaggaatttggtgcagcagtgaagggcccaagctctggagtcagattgcctaggtttgaattccagttcagccatttactatgcctttggaggtttacttaacttttcttaagcctcaatttcttatctgcaagctctaattctgttgcattaccttataaggtcaatataaggattatataagataatttatttaaagctttatcaatagtacctgacagacagtaaaaaaaaaaaaatggccattattaattttccatttccttcaaagtgattgttacattttggtatttccatttttcgttatgacaattatgctaattggcatttttcaagaaagttgtctatttaatttagattttcaaatgtattgaagtaaagttgcttatggtatttaaaaaatctccattatctttgctaacatttttagtttgcattatttacatttttacaaaaacagatgcatgttattggttttgtccactctcttctccaccctctactcctattgcttgacctgtgttataaatactatttctacctttttctaccccatttttcgtggggttctgtttttgttcattttccaatctcctatattgaattcagttcatatttcctttaaaaaaaagagaatatatttaataatacacatttggctccacataaagttttactcataccaatttttttgacatttctcattttattctttcctataattattttagttcatttttggtttactatttattgagtagcatttttttttgtcagtatctcctggtataaacttacttttcttatttttctaagtgtgatatgtttcaaacatacagaaaatgatagggataatatacttggaataaattttcatatctaatattattgattgtgattagaaaatgaaatctagatacttctgttttaatatatggagatttttatagtgactagtataggatcagagctttaaggtatattctgttatgtggtacacaacttgttacaaaaagtctataaaaatctaataagttgaattaataatcattatgttttgcttatactgtagtcgagtgttaaatattgctggaggtgttttatcttatttctaatagtttatctctttaaaaatatgtttatcaagattgccactattttgttttttataaagttaattgccctttatccatgctttgaaagtttttaaagattttctaggaaatgtcatggtcaggtccttcatggaattcttttatagggggacaaattcaatctagaatctaaacttttcttgctaggagcttcagaccattgttacatgattgcatgtatgtatttgcctttttgtttagttttttgaggaagagtctcgctaccactgtgccctaatactcaacctccaaaaatcaccgtttactgggacgtggaattttacatcctgcagtgaacgccactttgtgtctctctgtcagaaatattcaggtaacaattattatctagataactatggtactttatgctattacatatatatatatagagagagagagagtcactttctatagggagggaggggaacataggttgaaaaattacctattgggtagtatgcttaccacctgggtccaatacaccatgtaacaatcctacacatgtaccccctgtatctaaaataaaagccgaaaaaattttttaatactataaaagaatttatattaatttataatcatatggcttaaaatttcagcatggctaaatccatattgggttagtgagtcagagtttatcaaatggaatgtgatttttttaaaggatcattgccataattaattaaattaattaattgtatctgatggaatttgttaatagtagttatcccattatagtaattgaattttgttcttttttctactctggcatttttcagattttacattttattatgggaaaaggagaaaaaaacttcatatttttaattgagtgcagtattgagtattaagtccactaatagtattcactgttaaatttagcattaacaaataaacaagtgggggtttgaaacattataaacagatcactgtctatgcctttccataatccaaataaaagtagaatgcatacttaaaagtaggcatcatccatattttgaaaaatatatttttaaaaaagtattacattatttttcattgatcacaatgtgtttttaacaaatgatcaagaaaaaattttgtcatataatgagaactgtaagtagatatctcatgtgctttggcagaatttttttttgctaaattaatctttacccattttttccatgtttttaactaactcctttattagcgaagtactataaagcaataattcaaatacctcctcttgtggatggtttcttacatttcttcatgctagctctcccaggtgaaaactttgtaaggggatacttaatacatttatttccttcaaacaaaagaggtatttagcaccgacatgacatgataatgcaggttacatttatttgcagatattctcttcataaatcagaaaaatgaaacagaatgttgttctgattttagaaaacaaatgttgcagctcacacattttccttaaggtatacagcaagacatacctaattctctcacccaaaatctaaaataaataggcaaataatatctaaattagattagtatggggagaaatgtgaaaaaaatgtcccataacttgcagagtgtggggaagggtttgttgttgttgttgttttcttttacatgcagaagttaaaagcagacagacgttgcagaatgcttcagaaactgtaaagtatctaaataatctgtacaaaataatcccaaagactctgacttggcacagtgctaaaagggagtgtctgaaaagtaacatgcagctggtgagcatcacggacccttaccagcaggcattcctcagtgtgcaggcgctccttcacaactcttccttatggatcggactcttcagtcaagatgtaagtgttcagtcccaactgccaggactgggtgatggaaagcgacattttttattgtgcatagcttctctcacagcagactaaaacaaacagaagaactgaaaatcttactccagtaaatttcatggaatatgtcggggtttttaaattttgttttgagacaaaggctcacactgtcacccaggctggagtacagtggtgtgatcacacttcactgcagccttgacctcccgggctcaagcgatcctcccacctcagcctcttgagtatctgggactgcagttacacaccaccatacctggctaatttttgtattttttgtaaagatgaggttttgccatattgcccaagctggtctcaaatgcctagactcaagcactctgcccaccttggcctcccaaaggtgctgggattaccagcatgagccatggcacctagcagcaatatgtggtttttagaggcaattatctttccactattgaaagatctagtacttcattgtttaaatgaggaaaaggttctggtggagatatatatatatttgagcacttctttttatttattctaatcaaagacgagctagaatctggagctgccatatctcttcagccaatgaaaagataagggaagaatttaaaaatcagttgtgtggaagcactatggatagtgttaaagagtcctttccatccctttctcttttttctttttcttttttttttttttgagacaggttcttgttctgtcacccaggctggagtacagtggtgcaatctcggctcactgcaacctccacctccaaggttcaagtgattctcatgcttcagcctcctcagtagctgggattacaggcatgcgccaacacgcccagctaatttttgtatttgtaatagagatggggtttcaccatgttggcaaggctggtcttgaactctttacctcaagtgatccgcccgccccaggctcccaaagtgttgggattagaggtgtgagccaccacgaccagcttccatccctttcaacatcagcagcatggctgggcaccgtggtgcacacccgtagtcccatttactctggaggcaagaggataacttgagcccaggagttcaaatccagcctggactacatagcaaaaccccagtctctagtttaagaagaaaaaattcagcaaagtaaaattaagcaactctgaaaaggaggttgaatagtgttttcctccatctcaagtgctgatcctagatagatgtctcaagcacttctcattcatttcagagcccaacaaagaatgctagtctcctactaattcgcatcactaacctctgcacatgtagcacaaaccggaatcattacacagctgaagttttggctataattaaataagggatttttaaataaagctgtggtattcctattggcattataggccacctcttttctcagccatggtatatcccaaagtataccaggatgggtctagggatgcatggaaaaaatgcgattgaagactcagaattgaactgaagaatggatggaaaaacaagaattgttatcaaaagctcaattaaaagtagcatttaggaatagcttaaagaatagtctctctgagccacagggtattctaaagttaacccagatcggccgggcatggtggctcatgcctgtaatcccagcactttgggaggccaaagtgggtggatcacttgaggtcaggagtttgggaccagcctggccaacatggtgaaaccctgtctctactaaaaatacaaaaattagctgggtatcatggcgggcgtctgtaaccccagctactcagaaggctgaggcaccagaatcacttgaacctgggaggtggaggttgcagtgagccgagattataccactgcattccagcctgggcgacagagtgagactccatctctaaataaaaaaattaattaattaattaaattaaattaacccagagcaagccaggagatggggaagctgcttactcagtcctcacagtctcaattgttttatagcattgcatttacttgctttatcttcagcattggaaattctgtgaaacgctttgttgtgtctgttgtgaggaaacaataggtgattacatttcctagtttcagtcaccctaaatcttttgagacaaaaacagtattgcaatgtagaaaatttgtcagtaattaaaagaacaaaattaaagtcacctgtaatgccagtacctaaaaataaacatgattcaatcaatattttggtatggatctttcaagttatttttctatgtgtacctatttattttttagacagttggaatcagactattttgtaactcccctccccacttaatgatttgggtcttacttcttatcctattttcaacctttacctatggttctcttttccctttcacccttaattttaacatattctgtgtagctgtttaactatatatcctaatagctgccttaattctttgaaaatgacaggatgttaataaatactttacattgaaagcaatgagaagatattgaaagattttaaacagagtagtggcaatataagactttacttaagtagacgacactgtgtggaaggccggggaggacgcaagcagctggagagagggagagcagttatttttctataaattcatgcaggaaatgctgttggcgtttacagtgtctgaggagaggcagctctgggttatgtgaagtgcagagtgtggccatgcagtgggtcactcaagtacccagcttgaagaaataaaaatacatagaattaaaggaagtcaagaaggcttggaaacatgaacacaggcatcccaagttaatggtaggaccgggaggacagcaagaattgggacatcttagtgaatgtcagggaggagcaaggcgaccaagtcctcagtgaatgtcatggggagtttgcagtgatacaaggggaataatcctgaaaggaaataaaaggagataaaaatatccactactcctttctcatagtcctgtggtatctgagaatagaatatcaaatagtcttcccctgtgggtgctgaaaggagattattcccttggaaaagccagatttatgtatttatttaagattcagggggtacacatgcaggattgttacaatacatacactgtgggatgctgaggcttgggcttcagttgaacctgtcacccaaatagtgaacacagtacccaataggtagtgtttcaacccttgctccactccctccccacttttggagtccccagacaatatcatgcccatctttacatccatgtgtacccaatatttagctcccacttatataagtgagaacatgtggtatttggtcttctgttcctgcattaatttacttaggataatgtcctccagctacatccatgttgctgtaaaggagatgatttcgttcttttttatggctgcacagtatgccatcatgtatatgtgctacatcttcttgatccaatccactgctgatggacatctagattgattccctgtctttgctgttgtgaatagtgctacaataaacatatgagcgcaggtgtattttggtagaacgatttgttttcctctgggtatatacccagtaatgggattgctgggttgaatggtaattctatttttgttttttgggaaatctccaaactactttccgcaggggctgaactaatttataatcccaccaacaatgtgtgagcattccctggaaaagccagagttaaattaagatcaattaagatcaagaatttagtgaaaagatatttatagtcttcatactttgtattcagtaaaaagataaaaggtgtgggatgatttatttagatggaatggaaattccaaaggatcagggacagggttaggtggggagtgcagcaaaggggaagaaatgcagggcagtctgaatgagtgcaggcaaagtcgcatggccgaagggccacactggaggccacagtggcttaggccctaactgggttaggttaggggctaggattacagctggaactctggtcatgaacatttcagaatgaagcagcgagtggtgttgaggcttgactgtgttgctgtttatggtttactaaggagactgtgtcgcttcgttccatatttcaaataaactagtgatgcagattgtcttgggactcaggaaagcttagctcagtgggtctgttaggccagcaccaggcccaccagtgggtatgtaaggtctctggcagcaccatggggaagctcagacaggcctgtaccccacaatccatctcctgtacctagatgggtggtcaggaccttggcagggtgtaaaggcagacgttcacagacctctagcacacaacagaatctagtgaatgaagaagcttctctccccaacaagtgtgaaaacagtgatgtgagagccacagcgcctgaagagttcagaggaagggaaccaccagctctctgtgtgccagctagcccctgggttgcgggctttacacatgttatcccattaattccagccccacgaagttaagtgtcacacttaacttggtaggggatggaaatttggagagatggcacatgaaagctagtaagtgactgaatcaggattcaaaaccatgtaggtttagctccgtagcccatattctttccactatgccaggtggtctctgatctaatcagtacttatagtgatcctcaccccattttagctttctgatttctgataaccagtggatccaattatgtgtgaggcagcgtagcataatggttaggacatagactctggggatcgacagcctggcagaaaggcccagcactgtggtttgtattctgtgggactttgcacaagttacatacctttagtttcctcatctttaaaatggagataataatagtacctctcctatatggttgttacaaggattaagtaagccaatatttgtaaagcatttagaacaatgcttgttatgtagtaaatggtatgtaaatgtgtattaaatattaaaaaaattaaaaatcattagattgaccatgggagtcaaaataatacaaagggttaacatcaatattgccacctgaaatgtacttctgctccttacaggatgaactcaactttggttggtcagatgggaaacgtcttcattttagtcgctgggctgaaactaatgggcaactcgaagactgtgtagtattagacactgatggattctggaaaacagttgattgcaatgacaatcaaccaggtgctatttgctactattcaggaagtatgtgaatttcagatcttttaattcttaaattattaacagtcccataagtggtagaatttctgaggagtggttttataaaatctggttttggaattgtgaagaaattatagtcatgtctttttatggcaacatttgttgtgaaaatttgtattcaagtagaattatatattacatatattattattaatgggtcattttaggcatgttttatttttatgtcagctgacaatggggattaacacttaaaatcccattgttactctacctctttctgcatatatttatagttgtagaaagcttacatttgtgagaattcttttgtgattcataatatcacaactaacaggacttttatgagtcttaagattcacagcaaccacctcaagctagcttaagacaaggggaaatttaggatccccaaaacggggatagagctgaacctataactggagatgagttgacaatttctaaatttcactttgtaaatccctagagaacatctcatgaacttagcctgagtcaggtgtgcagtctctagcccagtcagaggaaagtgtttttacaactggcaaggtcacatttgtgggtctgtggtagaaagaagacactgcttcatggacaaagggacttattgtgatccaggagagatactgagtgatctctgccacatattaaatcagtttaatgtatttgagtggaatatgtttatatttgtatctttgtgaatgtatggccttttcataaaatggaaaaagatcataatcagatactgtagatgtcagattttaaatattatttttgtttgacttggttaaagcaataacttatttagaacatcaatgtttcatttaaatgttcctttaaaattaatagtatcagtagacagaaactttaaaataaattctcagagttatagttaggtgacttttaataatgaatatgtttgtacagcatctctaggggtggtcccttgtacttgacatttggtaatgcaggaagacagaaactgcatttaacctaatagcacctcattttttacattcttccatgccacagcaggggtaagaaaattgtgtcaagtaatttccttcctatagaaagctggctttttgtgtgctatatctgagtataaacagagacaggcttcaccaggatattacttctcggcttcctgaatatttcctacaaatcaagcctaatgactgcaaacaggatttaacatttatatctcaaattagaattcttaccattaactctttttctagatgagactgaaaaagaggtcaaaccagttgacagtgttaaatgtccatctcctgttctaaatactccgtggataccatttcagaactgttgctacaatttcataataacaaagaataggcatatggcaacaacacaggatgaagttcatactaaatgccagaaactgagtaagtattatattagtccattctcatgttgctataaggacatacccgaggctaggtaatttataaagaaaaagaggtttaatggcctcacagttccacatggctggggaggcctcacaatcatggcagaaggcaaaggagaagcaaagacatgtttacatggcagcaggcaagagagcatgtgcagggaaactgccctttgtaaaaccatcagatctcataagacttactatcacgagaacagcacgggaaaaacccaccctcaagattcaattacctcccaccaggtccctcccatgacatgtggggattatgggagctacaattcaacatgggatttggatggggaaacagccaaaccatatcaagtatattatactgtcattacttattgtattttgctaattaaaaaaatatttcctgtgttataaatatttctaattagcactagtaactagatgacaaaaatattcatctcctaatatctacattatcagtgacaaagtattaaaatttgtgttagttaaaatggaaagtataggcataactcctttctttactcttccattcaagaactagtctatgtttgtaaggaaggcaggttctcctttaaaaggaaaagaaatgggctaggcacactggctcatgcctgtaatcctagttctttggaaggctgaagtgggaggattgtttgatgccaaccattcaagaccagcctgggcaacatagtgagactttctgtctgcaaaaaattaaaagcatggtggcacatgcctgtaattctagctacttgggaggctaaggagggaggatctttgaacccaagaggttgaaggtgcagtgagctgtgattgaaccacctgcactccagcctggataacaggtgaccctatctccaaaaaaaaaaaaaaaaaggaagggggaaagaaatgacacacaagagagcagagaactggacattaaatcaagctaggctatggggaagtgaaaataagttagttggagcagtcaaaagcttagatacaccacaaggcagcagctaagcttaaagaagtgcacatttcacattttcagctctcaagagtcttcagataattcctatgagatccactaaggatttgtgacttccaaatgatggaactgttggaaccaatggaacaatgaacttagtgaaagttgctatagaaaatatcaaaccagtatttcccaaagcatgctccgtataacatcagtcttgagagatggtctgcaaaaagtccttagaataaggttgaaaaaaataaccaacaaaaaagaaaaaggttgagaaacactagacaccatagcttcctgttggacattaacaaatgtacattaacatatgccttaagaaatactggcataaactagtttaattttgtttaaaccaatgtttgcaaactttttttaaaatccatgtagatcttttctgaaacttccttgttaattttgtgaggaacaccctttgggaaatattaagcctttttaaccctcatactgaaaactaaggaaaaggaagatctgtcgtatagcccagcagtccccaacctttttggcactgacagggaggggtggatggtttcaggatgaaactgttccacctcagatcatcagaccttagttagattctcataaggagtatgtaagctatatccctcgcatgcatagttcacaagagggtttgcactcctctgtcaatctaatgccacagtgctctaacaggaggcagagctcaagcggtgatgctcgcttgcctgctgctcacctcctgctgtatggcccggttcctaacaggcccggttcctaacaggcctggttcctaacagtaccagtgtgtggcccgggggttgggaacccctgttatagttcatctaagaggttctaattattatagcgtaatctttgacagtatatcattactatgggtggatttataccaactgaaaaattacctttaaataggggaaagtgaagtgaatcaatgttttaaattctctactcagctactagttttctattataccataagaccaaatttaacatcaaaacatttgaaaactccttaacctattaattttagtacaatgggataattttattttacatatgtttctaattgtccaatattgtttatattttgaagtatattaaactgagaactaaaatgttttaaacttatcaaatagaagtgtactagataagtaattgttaaaattattgattattttttattcaacagatccaaaatcacatattctgagtattcgagatgaaaaggagaataactttgttcttgagcaactgctgtacttcaattatatggcttcatgggtcatgttaggaataacttatagaagtaagttgtaaatctgccaactttctctatttgtttttgtacttcattataacataattatcaagccatagttcttcaaagtacatgtctatcaatacgtgaaagtataattatgtacttagcataacttacataaataccaagacagtttttatgtctctgctctgcctttatcatcgagtttaaagttaaatggcggaaaataattttctgaattagtttgttcccgcactgctaaaaagaactacccgaacctgggtaatttatgaagaaaagagctttaattgagtcacggttccacaggctttacagaaagcatggctgggcagcctcaggaaacttacaatcatgtcagaggcgaatgggaaacaagcaggttttactatggtggagcaggagagagagtgaaggaggaggtgctacacacttttgaacaaccagaactcattagaactcactcactatcacgagaacagcaagggggaaaatcacctcccaccaggcccctcctccaagactgaagatcataattcaacatgagatttggatgaggacacagagccaaaccatatcaattttcttttttcactcttttatgtagcaactcaagactaactaaaaatgatcaccatcccatataaatcttcaatacttattttttgtttccactaactatgtgagatgagcaagaacagaatcactctattagtgttgcagttttgggtttataaccctggcttagtttatactggcccacatatgataagcattagaaaaatgagacacatggccaggtgtagcgtcccacgcctgtaatcccagtactttgggaggccaaggcgggtggatcaccagaggtcaggagtttgagaccagcctggccaacatggtgaaaccctgtctctactaaaaatacaaaaattagccaggcatggtgacgtgtgcctagttacttgggaagctgaggcaggagaatcacttgaacccgggaggcagaggttgcggtgagccaagatggtgccactgcactccagccagggcaacagagactcaagactccatctcaaaaaaaaaaaaaaaagaatagaaaaatgagacacatggtctgacaatgggctcgaatatttggaatttggactaaataccaccaatccaaaatatgattgataacaaaattttttaaaacagtctaatatagaggaaacaaggtcttgtttctaaatgcttctgagcatttagaaagatgctcagaaatgtcctgaaaatcatagacattttggaattaggaaaacctttccacggccatagagcatcaaaagcatacatttactctaaagagggtttgataaggggcacaggacaatgataaccaggggtagggaaggaaaagaagctaaattactcaaatctgcctgttttaaaaataggcttctcctttgctctctaacccatctgtttcttggggttaccaatgttttcctgaaatgtttatggttggcagaggggttaatggaaattaaactatcaagcaatagataaagacttggtttaccaagtgaggataagttcatcatagtaggacttagttggcccaaaccttttctctgatgacacttaactacccttgaattaaaatggagaaaaactagctggaaaattctgaggcttcacctgaaagtgactgaagaaacaatggtcttgtattgagccatagagaccacacccaggacagagagattgaaattgtaccctttggtatactttgtagttatattatcagaagcaactgaaaatctattataaattctgaaaaagcatttttagatcagaagactcccttattgttttaccttctttcataaaatgtttgagtaataaaatttctattaaaatatacaggcatatgagggacatatagaaagacatttcaggcaaatggcacatttgatttgaatctcattcttactgacttaatttacatctgtaagttactgttttgggttactttgatatacttatatttaattttttggcccctatacaaggaattctgtttttaaaacagctttgacttttcaatagcagggccatgaatagaaatcactgtaagtcactgtttttggttacgttgatatagaatatttaattgtatttggcacctacccaaagaagtttgtttttttaaacatttttgatttttcaatagcagggccatgaatagaaattactatgagaagccacagtatgtcaactgagagatacattaagccaagtgaaaaaagtgactttttcttaaaacaactttagaaatctaccattgcacatcatattggtcagaaaattgataactttgaagtttaggagaagggaagaggaactggaaggcatgagatgatataaagcagcaaacaagaaccaaatcgtgtgtgcagtgcttctaatgtgtcattgctgcaggcagatgtttaggggtcttgccttgggagatggtaatcaatgaagaccagaaataaccaggacaacattgggtgtgtgtaggtagtgatggcatcaatctttataccaatttataattgtaatatgcctagcacctttttttaaagctttattgcaatcatcactaccccaaaaagaaacacaatacccactagtattccctccctgtctcctagtcctcagcaaccactgatctactttctgtctctacagattgcctgaatgtaaaattctggacattttacataaatgaaatcataccatgtgtgctttttgcgtgtgactggctttttccattaagcataaagattttaaggtttatccacattgtagcatgtatcagtacgttattcctttttatgactgaataaaattccattctatggatataatacattttatttatccatgtatcacttgatggacatttaggtaaaacaacctaaattttaaaccatttttaattattatgtataatgcttctctgaacattcacgtacaagtttttgcatggacatatgtttccatttctcttgggtaaacccctgggaatagaattgctgcatcttttgtttaaccctttgaagaactaccaggttgttttccaaaccagctataccattttccattcccggtatatgagagtactgatttctccgtatcgatgccaacatttgtgtgtttttcattatagccatctaagtgagtgtggaatgatatctcactgggatttttatttcatttccctaatggctaatgatattaagcatcttttcatgtgcttattgaatatttgtatatcacctttggggaaatccctattcagattttttgctcatgttttaaattgagtctttttattgtcgaggggtaagaattctttatatattctggatataaatactttccagtatttatatataaatatataaataatttccaaattattttaaaatttatataaaatataaaattttatatttctggatataaataatttccaaatattttctcccatgactttacttatgccacaaaagtgtttttctttttttttcttctttttttattgtactttaagttctggggtacatgtgtagaacgtgcagttttgttacataggtatacacatgccatggtggtttgatgcacccatcaacccgtcacctacgttaggtatttctcctaatgttatccctcccctagccccctaccccccgacaggcccagtgtgtgatgttccactccctgtgtccatgtgttctcattgttcaactcccacttatgagtgagaacatgcggtgtttggttttctgttcctgtgttaatttgctgagattgatggtttctagcttcatccatgtccctgcaaaggacaggaactcatccttttttatggctgcatagtattctatggtatctatgtgccacattttctttatccagtttatcattgatggacatttgggttggttccaagtctttgctattggaatagtgccacaataaacatacgtgtgcatacatctttatagtggaatgatttgtaatcctttgagtatatacccagtaatgggattgctgggtcaaatgatatttctagttctagatccttaaggaattgccatactgtcttccacaatggttgaactaatttacagtcccaccaacagtgtaaaagtgttcctatttctccacatcctctccagcacctgttgttcctgactttttaatgattgtcattctaactggcatgagatggtatctcattgtggttttgatttgcatttctctaatgacgagtgatgatgagcattttttcatgtgtctgttggctgtataaatgtcttctcttgagaagtgtctgttcatatcctttgcccaattttgatggggttgtttgtttttttcttgtaaatttgttgaagtttcttgtagattctggatattagccctttgtcaaatggatagactgcaaaaattttctctcattttgtatgttgcctgttgactctgatgatagtttcttttgctatgcagaagctctttagtttaattagatcccatttgtcaattttggcttttgttgccgttgcttttggtgttttagacatgaagtctttgcccatgcctatgtcctggatggtattgcccaggtttccttctaggatttttatggtcataggtcttacatttaagtctttgatccatcttgagtttatttttgtataaggtgtgaggaaggggggtccagtttcagttttctgcatatggctagccagttttcccaacaccatttattaaatagggaatattttacccagtgcttgtttgtgtcagatttgtcaaagatcagatggttgtagatgtgtggtgttatttctgaggcctctgttctgttccattggtctatatctctgttttggtaccagtaccatgatgttttggttactgtagcctcatagtatagtttgaagtcaggtagcatgatgcctccatctttgttcttcttgtccaggattgtcttggctatccgggctcttttttggttccatatgaagtttaaagtagttttttccagttctgtgaagaaagtcagtggtagcttcatggggatagcattgaatctataaattactttgggcagtatggccattttcacgatattgattctacctatccatgagcatggaatgtttttccatttgtttgtgtcctcttttatttccttgagcagtggtttgtagttctccttgaagaggtccttcacatcccaggtaagttgtattcctaggtattttattctctttgtaacagttgtgaatgggagttcattcatgatttggctctctatttgtctgttattggtgtacaggaatgcttgtgatttttgcacattgattttgtatcttgagactttgctgaggttccttatcagcttaaggagaatttgggctgaggtgatggggctttctaaatatacaatcatgtcatctgcaaacagagacaatttgacttcccctcttcccatttgaatgcccttcatttctttctcttgccagattgccctggccagaacttccaatactatgttgaacaggagaggtgagagagggcatccttatcttgtgccagttttcaaagggaatgcttccagtttttgcccattcagtatgatactggctgtgggtttatcatgaatagctcttattattttgagatacgttccatcaatacctagtttgagagtttttagcatgaaggggtgttgaattttgtcgaaggccttttctgcaactattgagataatcatgtaatttttgtcattggttctgtttatgtgatggattatgtttattgatttgcatatgttgaaccagtctttcatcccagatatgaagccgacttgatcctggtggataaactttttgatgtgctgctggattcggtttgccagtattttcttgaggatttttgcatcgatgttcatcagagatattggcctgaaattttctttttttgttgtgtttctgccaggttttggtatcaggatgatgctggcctcataaaatgagtgaaggaggagtccctctttttctattgtttggaatagtttcagaaggaatgttaccagctcctctttgtacctctggtagaattcagctgtgaatctgtctggtcctggacttttttcggttggtaggctattaattactgcctaaatttcagaacttgttattggcttattcagggattcagcttcttcctggtttagacttgggagggtgtatgtgtccaggaatttatccatttcttctagattttctagtttatctgcatagaggtgtttatagtattctctgatggtagtttgtatttctgtgggatcagtggtggtatcccctatatcattttttattgtgtctatttgattcttatctcttttcttctttattagtctggctagtggtctatctattttattcatcttttcaaaaaccagctcctggattcactgattttttgaaggttgtttttttgtctctatcgccttcagttctgctctgacgttagttatttcttgtcttctgctagcttttgaatttgtttgctgttgcttctctacttcttttaactttgatgttagggtgttaattttagatctttcctgctttctcttgtgggcatttagtgctataaatttccccctacacactgctttaaatgtgtcccaaagattctgatatgttgtgtctttgttctcattggtttcaaagaacatctttatttctgccttcatttcgttatttacccagtgtcattcaggagcaggttgttcagtttccatgtagttgtgcggttttgagtgagtttcttaatcctgagttctaatttgattgcactgtggtatgagagacttatgatttccattcttttgcttttgcttaggagtgttttactttcaattatgtggtcaattttagaataagtgcgatgaggtgctgagaagaatgtatattctattgatttgggctggagagttctgtagatggctattaggtccacttggtccagagctgagttcaagtcctgaatatccttgttaattttctgtctcgttgatctaatattgacagtggggtgttaaagtctcccactattattgtgcaggagcctaagtctctttgtaggtctctatgaacttgctttgtgaatctgggtgctcctgtattgggtgcatatatgttttggatagttaactcttcttgctgcattgatccctctaccattatgtaatggccttctttgtctcttttgatctttgttagtttaaagtctgttttatcagagattaggattgcaacttctgctttttttttgttttgttttccatttgcttggtaaatattcctccatccctttattttgagcctatttgtgtctttgcacatgaggtgggtctcctgaacccatctcatctgaacagcacattgatgggtcttgactctttatccaatttgccagtcgtgtgttttaattgggggcatttagcccctttacatttaaggttaatattgttatgtgtgaatttgatcctgtcattatgatgctagctgattgttttgcatgttagttgatgcagtttcttcatagtgtgaatgttctttacagtttggtatgttttgcagtggctggtaccggtttttcctttccatgtttagtgcttccttcaggagctcttgtaaggcaggcttggtggtgacaaaatctctcagcacttgcctgtctgtcaaggattttatttctcctttgcttatgaagcttagtttggctggatatgaaattctgggttgaaaattcttttctttaggaatgttgaatattggctcccactctcttctggcttgtaaagtttctgcagggagatctactattagtctgatgggcttccctttgtgggtaacctgacctttctctctggctgttcttaacattttttccttcatttcaaccttggtaaatttgatgattatgtgttttggggttgctcctctcgaggagtatctttgggttgttctctgtgtcttctgaatttcagtgttggcctgtcttgctaggttggtgaagttctcccagataatatcctgaagtgtgttttccaacttggtttcattctcctcatcactttcaggtacaccagtcaaacgtagatttggtcttttcacatagtcccatatttcttggaggctttgttcattcctttttattcttttttctttaatcgtgtcttctctctttatttcattaagttgatcttcaatccctgatatcctttcttccgcttgatcaattcagctattgatacttgtgtatgcttcacgaagttctcatgctgtgtttttcagctccatcaggtcactaatgttcttctctacactgggtattctagttagcagttcctctaaccttttttcaaggttcttagcttccttgcattgggttagaacatgctcctttagctcggagcagtttgtaattacccaccttctgaagcccacttctgtcaattcatcaaactctttctccatccagttttgttcgctagctggtgaagagttgtgatcctttggaggagaagaagtgttctggtttttggaattttcagcctttttgcactggtttctccccatctttgtggatttatctacctttggtctttgatgttggtgaccttcagatggggtctttgagtggacatgctattcttttctgttttttagttttccttctaacaggcccctctgctgctggtctgctggagtttgctggatgtctacccgactctgtttgcctagttatcacccacggaggctgcagaacagcaaagattgctgcctgttctttcctctggaagcttcttcccagaggggcacctgcctgatgccagccagagctctcctgtatgaaatgtctgtcggcacctactgggagatgtctcccagtcagaatacctgggggtcagagacccacttgaggaggcagtctgacccttagcagagctcgaacactgtgctgggaggtccgctgctctcttcagagccatcaggcagggatgtttaactctgctataagtccctgactgtggctgctgcccttttttcagagatgccctgcccagagaggagaaatagggccatctggccacagcaaccttgctgagctgcagtgggctccacccagttcaaacttcccagcagctttgtttacactgggagcgtaaaactgcctactcgagcctcagcaatggcggatgccactcccccgaccaagctctagcgtcccaggtcaatctcagactgctgctatgctggcagcgagaatttcaagccagtagatcttagtttcctgggctccataggggtgggacccacctagccagaccacttggctccctggcttcagcacccctttccaggggagtgaacagttctgtctcaccggcattccaggcaccacttgggtatggggaaaaaagaactcctgcagctagtttggtgtctgcccaaatggctgcccagttttgtccttgaaacccagggccctggtggggtaggcaccagagggaatctcctcgtttgcaggttgcaaagaccctgggacaagtgcactatctgtgccagagttcctcaggctcagtccctcatggcttcccttggataggggagaaaattccccgaccccttgcatttcacaggtgaggcaatgccccaccctgcttcagctcgccctctgtgggctgcacccactgtccaaccagtcccattgagatgaacccggtacctcagttggaaatgcagaaatcacctgccttctgcatcaatcttgcttggagctgcacactggagttgttcctatttggccatcttgccagcaatccatcacaaaagtgtttttcttttgtcatttgtgcatatgtaagaaggctttgcttaccccagggttatgaagacttactcctatgttttctttcttttcttttctttttttttttttgagacagacttttgctcttgtcaccgaagctgaagtggtgcagtggcatgatcttggctcactgctacctctgcctcctaggttcaagcagttctccagcctcagccttctgagtacctggtattacagacaaccgccaccacgcccagctaatttttgtatttttagtagagatggggttttaccatgttggtcaggctggtctcgaactcctgacctcaggtgatctgcccacctcagcctcccaaagtgctgtgattacaggggtgagccaccatgcctggccttccatgttttcttctaaagattttatagctgtagcgcttatatttatgtctgtgatctactttaatttttgtgtgtggtgaaagaaaggggtccaacttcattttttttttttttttacatgtggatatccagtttagaagactattctttccacactgaattgtcttggcatccttcttaaaaatcaattgactggccaggcacggtggctcatgcctataatcgcagcaatttgggaggccaaggcggatggattatgagatcaggagttcaagacctgcctggccaagagggtgaaaccccatctctactaaaatatacaaaagttagccagccgcggtggtgggcacctgtaatccctgctactcgggaggctgaggcagagaattgcttgaacccaggaggtggaggttgcagtgagctgagatcgtgccactgcactccagcctgggtgacagagtgagactgtgtctcaaagaaaaaaaatattaattgaccataagtatgcacaactgtgaacagtttatgtccagagaagagatttctgtggtgacttttataacttatcaatcatgttttaaataaataaaatagttatgttcatttccatgcaattaaacgtatatgtaagagaaaataatatttttttatttcaataggtttttggggaacaggtggtggttggttacatagataagttctttagtgttgacttctgagattttggtgcacccatcacacgagcagtgtacactgtacctagtgtgtaatcttttatccctcatcccctcccactcttccccccgagttcccagagtctattgtatcattttatgcctttgcatcctcatagcttagctcccacttggtgagaacacacaatgtttggttttccattcctgagttacttcacttagaataatgatctccatttccattcaggttgctgcgaatgccattatttcattcctttttatggctgagtagtattccatggtacatatataccacattaccacattttctttgttcacttgttgattgatgggcatttgggctggttccatatttttgctattgtgaattgtgctgctataaacatgcatgtgcaagtatctttttcatataatgacttcaagaaaagaatatttgatgacaaaaatgaaatgttattactgaaggatggtggaattataggtcaatatttatagtttgtatttatattcaaattaaaaatgagcatgatttactgttataatcagaaaatatcttaaagggttatacataatcatacaaccttttagaaggttgggaaaagagaaaattagtcaagtttgaaatcttaactgtataagtgtaattcaagtcttgatttaatctctaagcataggaaaaaatgtttcttctctagataagtctcttatgtggtttgataagaccccactgtcatatacacattggagagcaggaagaccaactataaaaaatgagaagtttttggctggtttaagtactgacggcttctgggatattcaaacctttaaagttattgaagaagcagtttattttcaccagcacagcattcttgcttgtaaaattgaaatgggtaagtatagtaaaatatagagttttctttcactccagggaaagaatataaggctattagttccaccagtgggaatcatacaatcaaatgcttcctctgtattcagtcctgtgcgaggtgttacagaggttatcgaggaaggaaaagatacgggccctgctgtcaaggttttgaccctaaggagtaaaatgtagttgtggagacagcattaaattccttatcattgtttaatgtaaattggtcttagattaattgatacaggcttaaattgtggggaagtcaaaaccgatacattggaaaggggaataacaaaaaaaaaaggaaaggcttcaagaagaggtgaaacttggttggggtttgaaaaatggatagggtttatataaataagaaagtgtttggggaacgagttttaacattccgtgcaaagtgaatgtctctccaccttgcttaatctttaaataaatctatttttaaatatatgttagttttaattttttcacagcttaaaaactgttaattattaccactgtgccctaaaactgtcattactcccactgtgcccaaagctccctgctcactgggagcccgtaaaggtggagtgctggctagttggctcacttacagcgccgcagtcacttcccaagaccgtgtccaccagcaacctccagggattccttattctaacctactttgagtgcatgtaaacttttgagacattttagaaacttagtctctatccccagtttctaggccttctcccagttccctgtttttccccattcttgctcagcaaagcatctttttctcaatcaagctggtctcttcattgtcccaggcacagtgtatgcccatcctcatacttgcacctttatgttttccttctgccaagaagttttccaatttctttctttctttattttttttacatctttaataaacttttcattttaggatagctttagagttacagaaaagttgcaaagatagtacagagcattcccatctaccctacaatcaatttcccctactgttggcatattactttagtatggtacatttgtcacaactaataaaccaatatttatccattattatctttaactaaagtccacacattattcaaatttctgtagtttttatttaacatactttttctttctaggatcccacctaacctttagttctcctgcctccttaagctcctcttggctggctgttttctcagacttttcttatttttgctggccttgacagttttgaggaacactggtcatgtatttggtagaacgtccctcagtttgggttggcgtatgtttttctcatgattaaactggggttataagtttttgagggaagaccaaagatgtgagggagcattctcacttcacatggacagcatgtactattcatatgacttatcactggccacctggcccaaggtagtgtttgttaggttctctgctgcaaagttacctcttttcctcctttccatactgtcttctttccaaggaagtcactatgttgagtccacacttaatagggtagaaagttatcctccaccttcctatgaggggagtatcgatataaattacttgaaattcttctgcacaggatatttgtctattttctccaatttttattttattttattattttatttatttatttatttttttggagatggagtcttgctctgtcacccaggctggagtgcagtggcgccatctcagctcactgcaacctctgcctcctgggttccagcgattctcctgcctcagcctcccaagtacctgggattacaggcacgccccaccatgcccagctaattttttgtatttttggtagagacggggtttcaccatgttggccaggatggtcttgaactcctgacctcaggtgatccccccgccttggcctcccaaaatgctgggattacaggcgtgagccactgcacctggccccaatttttaaatttattcagtcatttatttataccctcatcattgtagtttttttgttatttgtttgtttgtagcacttccatactttctccttaccttctttttattcttgatttcccccaatcctctagacctagtataggttcattgttatttattttatactttggattataatctaacatactgcattctgtaatattttgcttaagtctttccagctttggcccttgggagctctttcacttggctcccatgtcccttgaaataacctcgtcattgtggctttgctgtttgtgcttgttttaagcacttccttactttctggttcccttatttctttttagtcttaatttcacctaacccttgagacctggtttatcaagtagtcttcctgactcttctcattcaaatgaatctctaccaatttcacataccctactggttaacagttttgccatcatttcagccattgttgtttctgtctccaactaatatatgagcttcttaaatcaaagaaaatgtttatgccttttaaaatatcaatcagagaactttaagagcctaagatatgtgtcataccagtaagaaaaataaaatatacatttgacctcccttattaataagaaacccagttttatttaacttttgaaatgattgcatgttgtctcatccaaaagatgtatttgaaataatttaaattttaatcaccagtgcttttaattattatagttgactacaaagaagaatataatactacactgccacagtttatgccatatgaagatggtatttacagtgttattcaaaaaaaggtaacatggtatgaagcattaaacatgtgttctcaaagtggaggtcacttggcaagcgttcacaaccaaaatggccagctctttctggaagatattgtaaaacgtgatggatttccactatgggttgggctctcaagtcatgatgtaagtcttgcttcgttttccagaaacttttcaaatgtgttattttgagggttagaaatttgagcgtaaagtattaacacaaagtacaacattagatgaagtactgggactccgcttgcatagcatggtgctttcttaccttttacaacacagaacaaatagaaaattttactgtagcatgcactaggacaaatgatcaggccatcccaagggcccagtggatgactatctcaacaacacctctatagcctatttgggacagacaaattggaaagctgataaaaatgaaatagcatagaatcagaaaaccctgagtttgagtaccagtagcagatcttccatttatgtgctgggtgatcattaacctttgcaaccttatttcctcatgtagaaaatcagggtaataataatttcactgagattttaacacaaaagtttatacaaagtaccatctaaaattctccacatggttaggactaataaacgtataccttcttcccacttttcctctagaaaattatactacttaggattaattctgctagtaaagacatctgtgccactatttgaatcatattatttaatcatttatgtacttacagtagggtcttgtgtacaaaaaatggttatctattgagactagagttgtagttttaatttaaataatctttagaacagagtggggaagatttttttttaaaagcatggcaagttaagattataaattcaaggaaaattcaaaaatagtcttcccattttgagtttcttgggaagtgtttctcttttctagctccctactgcttggtgtcctctgtagtgtgaaaaatgtagccagagacacaaaacacaaaactataaaacacagaaaacaatattcagaacaatatgaaggttgggattgtaaatttgtaattatgacaaatggaagccatttgcatgttgtttaatttcgagtgtcacataaactcatccttcaaaaaaatctgaagaccaggtgtagtaactctgtctgtaagtttaaagttctccataaactgtatcagagcaaatgtcccaaatcaatgcatcagaagtaaatcagacctacaataatagtaggttcagacctacaatactgtaagcaaataattaatattccattataatatttcttaaagtatgtatgttgttctttgtattctttttgaagtcaaacatctggattcaggttatctctattgttcttacaacagggaagtgaatcaagttttgaatggtctgatggtagtacatttgactatatcccatggaaaggccaaacatctcctggaaattgtgttctcttggatccaaaaggaacttggaaacatgaaaaatgcaactctgttaaggatggtgctatttgttataaacctacaaaatgtaagacttcaatttcagtaacagtacatttatgaaaatgtgacataatttatgcacataattaaaagctcagtggaatttttatttaaagatttattcacaagggccgggcgcagtggctcgcgcctgtaatcccagcactttgggaggccgaggcgtgcggatcacgaggtcaggagatggagatcatcctggctaacaaggtgaaaccccttctctactaaaaatgcaaaaaaaatagctgggcatggtggcgggcgcctgtagtcccagctagtcaggaggctgaggcgggagaatggcgtgaacccgggaggcggagcttgcagtgagccgagattgcgccactgcagtccagcctgggagacagagcaagactccgtctcaaaaaaaaaaaaaaaaaaaaagatgtattcacaaataatttttgtgaaaataattttgatactttgtaaatggaaacaaatacagtataagcactcagggaatttattcccaatgactttcatttgttctgtcaccaggtaaattctaccctagaatttgtgaattctaatttcacttagcaatgtttttcaaaggctgagatgcttatttcaaaaaagggtcccacaacatataaatttggggaacacctcatgtgatttaccgtattaaagtttctaagagagtttcttttcttttcttttcttttcctttcttttcttttcttttttcttttcttatcttttctttttctttttttttttttgacagggtttcagctctgttgcccagactggagtgcagtggcatgaacatggctcactgcagccttgacctcctaggctcaagcagtcctcccaactcagcctcctgagtagctgggaccacatacacatgccaccacacccagctaatatttaaaatattttgtagagttagggtctcacaatgctgttcaagctggtcttgaactaggatcctaggctcaaacaatcctcctgtttcagcctcccaaagtgctgagagtataggtgtgagctactacgcctggccaaaggttctaagagagtttctgtaataatgaagtctgtttaactttgtgtaaccaagcattttccaaatttatatgatccttaaagtttaagggaagagcctcttccattagaggctggacttagggtcacccctggtggataaagcatgaaccttgaggaagaccacaaaaaaacaaactaccggggactgcagaggcctgcaggacaggctggggggtggtggcattggtttccgaagactctggttctcaatgctcaccatgttttctgctctgaagaatcttgaacggcagattcaacatttggttgaacagattcaggccgaagaaaatgtgaaaactttagagaagcaggttaataaaagaaagggagaatgatataaaggatgaggaatcaaggtacaatcaagaactgacttctcagttgttaggcacagaaaacaaatgtaactctttagaaaaacaattggaatacatgagaaataaggcatgcagaaatagagaaacaggctttataggatagagaatgataagatggccagacataagttctgtgctctaccaggttgaagagtgcctcctccccaaagattcccgtccagtcagaaccttagaatgtgactttactgagaaatagtctttacagatctaggtagttgaggtgaggacatattggataatggtgggccctaaatccaatgactagtgtccttataagagggagatacagacacacagagggaaaaagtccacgtgatgacaaaggctgagattgcagtgacagagtgataaaccaaggactgtcggcaaccaccagaagatgagagggaggcacgagacagattctccaatacagcctccaatgaaaaccaatcctaacaccctcttcaattcagacttctagcctccagaactgtgagagcatacatttctgttgttttaagccaccaattttgtggaatttattatggcagcccaaggaaacgaatacaagggctaactttaaaaactggatcttcaaaaaaaaaaaaaacaaaacagagaataacaggcattagtgaagatgtggagaaaatggaacccttatgcactgctggtaggaatataaaacagtgtaaccactgtgcaaaatggtgtggcaattcttcaaaaacatgtacataagattactatgtgatccagcacttcaggtatatactcaaaacaactgaaagcagggattcaaacaggtgtttgtacaaccatgtcatagcagcataattcataatagccaaaagatgaaagcaacccaagtgtccatggatggacgaatggataagaagccttaaaaaggaaggaaatgctgatgcatgctgcaacacagatgaaccctgaagacagtatgctaagtgaaataagccagtcacaaaaagacaaatactctatgattccatttatatgaggtagtacccagagttgtcaaattcatagagacaggaagtggaatggcagttaccagggactagatggaggggaatatggggagttattgtttagtgggtatagagtttcagttttgcaagataaaaaattttagagatgggtggtggtgatagttgtacaacagagtgaattcatttagcaccacgggactgtacacttaaaaatggttaaggccagatgtggtggttcatgcttgtaatctcagcactttggggggctgagacaggtgggtggcttgagcccaggagttcaagaccagcctgggcaacacagtaagactccgtctctacaaaaacgtgtaaaaattagctggacacagtagtacatgcctgtaatcccagctacttgggaaactgaggcaggaggatctattgcacccaagagtttgagactgcagtgagctatgattgcactactgcattccaacctgggtgacagaataagaccctgtctctaaaaacaaaacaaaaccaaaatggttaagatggtaaattttatgttatgtgtattttaccacaattaaaaaaaatggatcttcttgaacaggaatgtaacacacttaccacgatgcaagcccttacagaaaaaaaaaaaaaaagagttggaagcaaaacttcatgaagaacaagaagaaaaaaaaatgtacgcagcctaagagaccccagttgcagactatactagaaacaaatagaccaaagataaggcagttccttatgttgccagtgcaagaagtaatgttaaaaaaaaaaaggtcaaaccattcagaaaagttccctatcctaatgatgccataataatcaatgttcaacaagttttgcattaacaattgagcccagtgcaacaatgagtaatcagcaatatacctttgcccaaccaactattttcataaggtggtaaaaacaagaacttactagtaacatttcttttcaacagcagcattgatgaggagttgtgagaagttttatagattgtatagatgaatttggcaaatgcattttgatctgcagcagctgggaaacttacccaggagtccaactgctgaactgaagacttagtactcaaattggtgtgttagtgagaagaatggaggcaaaagccaatcaaataaccgaagttcaaaaagatcaagtctggtttctaacagaagatagagaagcagcagaaggaactaagggccactaaagagtctcacagtagccgccattcctctctaatcacagagaccacaaataaggactctgccaagtggagatttggagaaaaaaacagaaaaagcctttacttactgaaggacataaagatcatacagaatgcattacaaaacaatagtttgggttgagattactgactggtaccaggtcagatatttgattcagataagctgtaccgcactaatacgacattgacaatttactttccagttttcatatgctcttcggttggaattaaaaacaggtgttaaagggcacaagctgcattcctcaggctgcttctgttactcagcacaattaaaaatcaatttaaatggaaaccaggggcatttttaagagctaagaagccactcctagtctttttttgtttgagtgatgttgcggtgctgatgtattatgctttgtaaaacaaattagctatttttaaaaaatagttcttcttatgactaagtaaaactagatttatttagattatcaaaataaaaaggaatccaacgggctaggcgctgtggggtcacgcctgtaatcccagcactttgggagcctgaggcaggcaaatcacttgaggtgaggagtttgaaaccagcctggccagcatggtgaaacttcgtctctactaaaaaaaataataataaacaaaaaaaggaatccaaagaaagaaataattttaattattatttcagagtactttcaggtctgcctggcctgtctttacttctttttctagtctgtctttctcattgtttctactttagtccaaatcagtcttagaaagctaaggcactttccacttctatcacctaggttttttaaacggtattccaaaaagttaattaaaatatgtatttatagagtgtgggctgtggctttctctggtatgagttaaatgctactcaaccacaaacgcaacagttccaatcagggacattgaagtagattttgaaaggcagtcttttttttccatgcattgttacaactgtgtctaacatttttatagctaaaaagctgtcccgtcttacatattcatcaagatgtccagcagcaaaagagaatgggtcacggtggatccagtacaagggtcactgttacaagtctgatcaggcattgcacagtttttcagaggccaaaaaattgtgttcaaaacatggtgagttaaaatttgttgattttcttatgactcaataatttttagaaatgtttcttaaggatataatttgaagcaatgattgtatttttgaaaatatttttaaagcactttccatttctaatagcgctataaactaattgcccagtggtagggaaatggttaagtatctgatgacataggaactcaatgaaatattggaatagccattaaaaacgcctgtaatcccagcactttgggaggccaaggcgggcagatcatgaggtcaagagatcaagaccatcctggccaacatggtgaaaccctatctctactaaaaatacaaaaattagctgggtgtggtcgcacacacctgtagtcccagctactcgggaggctgaggcaggagaatcgcttgaacccaggaggcggaggttgcagtgagctgagatggcaccactgcactccagcctgggtgacagagcaagactctatctcaaaaaaaaattatcaatgttaataataagtacatggaaaataataagttggaagaagtagaattttaaagtggtggctgggtgcggtggctcacgcctataatcccagcactttgggaggccgaggtgggaggatcacttgaggttagccattaaagactagcgtgaccaacatggcgagccctcgtctctactaaaaatacaaaacttagctgggcgtggtggcgtgcacctgtaatcccagctacttgggaagctgaggcaggagaatcacatgaaccagggaggtggaggttgcagtgagccaagactgtgccactgcgctccagcctgggcgacagagcaagactccatctcaaaaataaataaataaataaaataaataataaaaataataataaatgtaaaataataaaataaaagtggctaagtgaactgctaagtaaaaatactgacaaatgattggaaacggttttacctatagctagatatgcttagaaaaaggaattaagaggtaaaatttttgtaaagttagctaagtagtaaataaaaattatagttgttccattgcttagttattaatacataagcttagcctcaccagggtaacaaatcaaagtagtatggttgtccatccgttctgcaataggattggccacatcctctgaccaccataaagggcagtgctttttgccttcagatttagctattttagaaagagtagcaatgattggctctttcccgtgacaaatttgatccatagtcaaactgtaaaatgacttctaggggaactacctagagtatttcaaagaccaaaacttgtttacctgcttccttgggtagcaaattagccaggtagatggatggcatttatctaatttattctgataaccgttgtggagacacttgactgattgaaaaatcttgtagttaccgggaacttttgtgtgggaaccattcggttttatacctgaatacacatgatggaaactgttgtaagatatatgtatgttttgaaagtcataaacctttttctcctaaaggagaaaacagaatggtttactgtaaaactaatatgtaggttaagcacttaagacttggaggcatgagggtctgggttcaaatcccagttcccacatatcctagctaagtggcattgggaggttacacaactctttctcttttctcatctgaacagtcagagaggtctcaggggtaggcagttccagggccaaaaaaatattgccagataaatattttgaagaaacacaaaatttctttatacgtgtttggaagtaatttttttgaagtacttataaaattttgacctaaataccagtttttaaaaactgtctctgtgtaaggcttgaatttatcaatgatcttgttaataatatatgtatttttcaaatggctagttgagaataaactacttctctagtttccataaagctaattgagaatgtgttttctttcaacagatcactctgcaactatcgtttccataaaagatgaagatgagaataaatttgtgagcagactgatgagggaaaataataacattaccatgagagtttggcttggattatctcaacattctgttggtaagtgaaataattgtatgtgtagtgtgcaaagagagttctaactcatcctaaataacaagtcgtccttgctaaagaatgttaagtagtggctaattcagatgcctcttctggataaataagctaggtcgctggctgttctggatggttataaattttgaatgaatccatgagttaacttagcaatgacggaaaccactaatgacacagaaaatcctgttaaataaagtggaatctttctagaggcttatttctgggatccttggatcaacatcaggacattttcttctccacaggaatgtctgtgtccccacaaggaacccatgcctgccttctcttagagttctagtgcctgtcaccgcatggatttgcagcttataacttcgttattcagaaagttatcttcttgttattcccttctctctaagaatatttttaccactggttaaaattatgtcttaatagtaatctttaaaaactgtcttagtgttaggttggtgtgaaagtaattgcagcttttgccattacttttgcgccaacctataaaattgcagataattgattcaaagaaaatttgtggaaggattttttaatacgaaatagtagatacagggtttaggtgaacttggaattggtagaaataagagtacaaatatgacagaagataaggtttttcacattttatgcaaagttgaattttaaattattaaaatgtgaattttaaaatgttaagtacttgtcaaaaaataaaaggattccaagttgtccatctaaatgaatcctaaatcgtgtttacactgtcaccacaaggtggtgccacttcagctggaaagcaaaaatggagtcctggtggtggtgtgggagaaaggtggggatggagattcctgcacccttcctcttccaccagcatatctttaatgatatgactttttacaattagagtaggggaaggatatgggtccttagaaatctctccctcacaaaataaatgtgcaagcattctgcactttaacggaaacaccacattctctatctgtgttgtccaatagaactttctacaaagacagaaatgttctatatctgcactgtccaatatagtagtcactggccacatgtggctcttgagcacttgaaatgtgactagtgcaactgaagaactgattttatttttttcatttttaatgcattttattttaacaagtggctctcatattggacagcacagttctgatgagttacatgaacccatgcttgtaacttactagtttagtggcagtagacatagttgtatttaatttctttcttcagaccagtcttggagttggttagatggatcagaagtgacatttgtcaaatgggaaaataaaagtaagagtggtgttggaagatgtagcatgttgatagcttcaaatgaaacttggaaaaaagttgaatgtgaacatggttttggaagagttgtctgcaaagtgcctctgggtaagtatggaacctgtccttaggagactttttgcagaacagtcaggaaataaatgtacaatccaattatgtacaaaattctgtatttagtcttgaagtatttagtccttaaagtatatccaactatcttgattaagtcatagagatttccccctgaaaaatagattacaagggacgataactgcacaagatgtccaggactccagtctacattttatataattctttcctaagaaaaacagaagttgccagggtattagggaagtaatttcttttaaaatgttcttgagatgtattttattctatagtttgattatataaaagcttaaaggtctatttctgcagttaatttgcttcctttcttcctaatcccataaaactcatggttaattttaaaacaatgcaaaactggatttagttattgaaaacattcagggtatctataaaaaatcataatttgaacttacatttcattatgaattgatacataaaattaccattaaaatgttatattaacttcatttctggagaaagagctccaaatttttcacagtaacatttttaaagatcttgcataaaacttttgcttcttgtatataaatattaaagataaaacctcaattctaggtaatcagtatccatgtatacacacactgagacagtaaatagagtgtctactatatgccatgccctgttttgcacactgggatgcacctgagaacaagacagataaggtacctgttctcacagagattacaatctggtgaagaaagataagtaaacaggtcaattttttaaagagaggaaaatatcaaatagttataaactctatgtgatggagactcagtggatagctactctagattaggaaaccagggaagaagcctagaagcaggagacaccgaagctaagatctaaaaaatcaagccaagcaaacttcaagggaaagggcataacagacagaggtaccagttggagcaaagagcctaaggcagaacaagttggctgagcgctcagggaagaactgaaaggtaggcaggtgctagacatacagagctttggaagcaaggcttgagttctggttttattctgagtggaatggaaagcaactggaagatttggggggttgggtgggagcagagttagggtgttgcaaatcaaaagttctacgttggccattttgagttatccatagagggacgagatgtgtagtgtgcatagcaatggtatttaaagtcatggaacagagcgaatccatctgggcagtatgcagataagggtcttggaacagcagctgcactaaatgaactcatctgagagacttaaatcattttgaagcaaataacactttatttagccccaggtaagtcaaaaacaaaaatttatagcttttagcaatttgctatcaaagtaggataatatacaagtagtgatgttcccaaattggtgttaggaagggggaatgtgagaataatcatagcgcattaatgtctttggaagaaaattcctatcacaatgaagaggatttgaatgaataggaaaacacttacatttgaaaagaaatcacttaagtgtttcttttgatctgacgatgagtttgaattctatgttagcgctatgaaacaatcagatttattatgtctgtatacagcttacaggtttacatgtgtgacacaacccataatgtataaaatcaataatgatcacttttgtattctctcctccaacatcaaaccttttcctgttccaggccctgattacacagcaatagctatcatagttgccacactaagtatcttagttctcatgggcggactgatttggttcctcttccaaaggcaccgtttgcacctggcgggtttctcatcagttcgatatgcacaaggagtgaatgaagatgagattatgcttccttctttccatgactaaattcttctaaaagttttctaatttgcactaatgtgttatgagaaattagtcacttaaaatgtcccagtgtcagtatttactctgctccaaagtagaactcttaaatactttttcagttgtttagatcttaggcatgtgctggtatccacagttaattccctgctaaatgccatgtttatcaccctaattaatagaatggaggggactccaaagctggaactgaagtccaaattgtttgtacagtaatatgtttaatgttcattttctctgtatgaatgtgattggtaactaggatatgtatattttaatagaatttttaacaaaacttcttagaaaattaaaataggcatattactaggtgacatgtctactttttaatttttaagagcatccggccaaatgcaaaattagtacctcaaagtaaaaattgaactgtaaactctatcagcattgtttcaaaatagtcatttttagcactggggaaaaataaacaataagacatgcttactttttaatttttatttttttgagactgagtctctctctgttgcccaggctggagtacaatggcgtgatctcggctcactgcaaatctccgcctcccaggttcaagcgattctcctgcctcagcctcctgagtagctgggattacaggcaactgccaccatgcccggctaatttttgtatttttagtagagatggggtttcaccatgttggccaggctggtctcgaactcgtgaccgcaggtgatcctcccgcctcggcctcccaaagtgctgggattacaggcatgagccaccgcgcctggcctctgcttactttttatatagcaaaatgattcctcttggcaagatgtttcttatattattccaaagttatttcataccattattatgtaaatatgaagagtttttttctgtttataattgtttataaaacaatgacttttaaagatttagtgcttaacattttcccaagtgtgggaacattatttttagattgagtaggtaccttgtagcagtgtgctttgcattttctgatgtattacatgactgtttcttttgtaaagagaatcaactaggtatttaagactgataattttacaatttatatgcttcacatagcatgtcaacttttgactaagaattttgttttacttttttaacatgtgttaaacagagaaagggtccatgaaggaaagtgtatgagttgcatttgtaaaaatgagactttttcagtggaactctaaaccttgtgatgactactaacaaatgtaaaattatgagtgattaagaaaacattgctttgtggttatcactttaagttttgacacctagattatagtcttagtaatagcatccactggaaaaggtgaaaatgttttattcggcatttaacttacatttgtactttatttttgtataaaatccatagatttattttacatttagagtatttacactatgataaagttgtaaataattttctaagacagtttttatatagtctacagttgtcctgatttcttattgaatttgttagactagttctcttgtcctgtgatctgtgtacaattttagtcactaagactttcctccaagaactaagccaacttgatgtgaaaagcacagctgtatataatggtgatgtcataataaagttgttttatcttttaagtaaaagtaaaagtgctggagttgatccttcttgaaaaaaaaaatctctagattgggttttttatgttaggcatatagtacaagaaataaattgaccacctattgtaaagcgaggcatttgctaagagattttgtgtgcattttttagagaataaataggcgggtagtggctcacacccgtaatccctcttgacactttgggaggccaaggcagggggatcatttgagcccaggaattcaagttcagcatgggcaacaaagcaagaccccatttctaaaaaaaaataaaataattagccaggtgtggtggcacccatgtgtagtgccagctactcaagaagccaaggcaggaggatcccatgagcccaggagtttgaggctacagtgagctatgaacgtgccactgaactccagtctgggtgacagagcaagaccctgttttgaaaaacaagtcgatattgatccaattgctgaatactggaaaggcaaagtcagataaaactggattctcggaattaggaaaccaatgaccatcttagccaatgcaaatgtagcagagtagtgaagccagaatccagatggaagtgagtttaaaagtgaaagggaaggccaggtgtggcatctcgtgcctgtaatcccagcactttgggaatccgaggtgggtggatcacctgaggtcaggagtttgagaccagcctggccaaatggtgaaaccccatctctactaaaaatacaaaaaaaaaaaaaaaaaaaaaaaaaaattagcccggtgtggtggtgcatgcttgtaatcccagctacttgggaagctgaggcgggagactctcttgaacccaggaggcagaggctgcagtgagctgagatcgtaccattgcattccagcctgggtgacagagcaagactctgtctcaaaaaaaaaaaaaaaaaaaaaaaaaaaattgaaagggaaattaggagatgaggaacatgagatttcgagaagtatgatggagacagaaaggaaaggggctgggccatagccagaggggaaagaagggttgaaaaagggtttttttctaaaggggagagaaagaggttcacaagtttagaagctgagatgaaaaaaacaaaaacaaaaacaaaaataatggacagagagaagttgatgatgcagtggggagagggaatcattaatggaagatcttggagaagataaaatgagaggggcagtcctaagcagaaagaggaactggtttgggtgggctggagaagcatgccttcctctctgagaccacaagagaagaactgcagataagcatttgaagatgtttgtctatatgtaatggcacctgttttcttgtgtactagaaggcaaggtctgctgagaaagatgggtagcagatggggtcttttaaaaagttttttaattttttagagacagggtctgtctcagttgcccaggctggaatgcagtggtgcaactctagctcactgcagtctcgacctccaacattaacttttttttttccctagagacaggtgatttcaatgttacctaggctgctctcaaactcctgggctcaagtgatcctcccacttcagcctcccaagtgttgggattacaggtgtgagccaccatacccagcctgggatcttagcttgaaaagagtaataaatttgaaagactcaatgagagaaataggagaggacagtgactaaggtaaaatcaaatacaaggattgcagaagaggcatagaaggcccagatgaaattaaaagccatattgtttatagtgacagccatcgggagaactgattgatttcctccacctgtcctcagttaacttcagtaaagttgaggaaaaagagagcacgggccaggcgaggtggctcatgcctgtaatcccagcactttgggaggccaaggcgggcagatcacttgaggtcaggagttcaagaccagcctggccaacatggtgaaaccccacctctactaaaaatagaaaaaacttagccaggtgtggtgatacacgcctgtaatcctagctactcgggaggctgaggcaggagaattgcttgaacctataaagtggaggttgaggtgagctgagatagcgcgactgcactccagcctgggggacagagtgagactccgtctaaaaaaaaaaaaaagcatgaagaagaaagcggagaccacagattccgagttggccaggtgagcacaccaggggaacaaggggacagaggatgtggtatttcggctgggtggagaagggagaaataaaaggctgagaaaaatgcaggcaagggactgaagtctggcatgagccaaaagaggatgtaagttggagacagagtgaaggaaaattaagggtatgaggtgtaactggagagtaaatgggagagcgaaatataacagtacccacatacaggcaataagtagtctatttcatcagattagcatcaaaaatgaggcagtgtgcaccagagttaacaataaaataatataattttctttagtacaaatgacttaaaatgacagtgttaaaatgggttttgccttaattagattgattcattaggatgtcaattctattgtaaatataaaaatatttgaaaagtagcttaacacaaaaccacattgataaaatatactttggtgcctgaggtgggggtggaagagataactttcacaattacatgattgcttagaactgttcattttacttctgtagttaggagggcaaaagggtccagaatcaagatgtgtcaatattccaatatagagtatctttggaaggatttgctctggtctggagtttggtatataataaactcagtattggcagcctgagaagaaaaatggaagtaaataagttaagcaagaccttaatactttggcaaaggggcagaacctggaataggtgggagagtccagcagaggagctgggctctggttcatttgttggcattctctgtgagcccacgggggaatcacatcccttctttgggtcactcaatttccttactagtaccacttctaacactctatgactctccttatagaccccttgggtcaaatttccttggtgtaaccactctggattatcagaagtgtggaaagggttagaaagagttggaaagggtcagattttatttttttaaaaatagactaatttttgagcagttttagatgtatacaaaaaatgtagcagaaggtacagagctcccatgtacctccttacacataccccagtttccccaattattaacatcttgcattagcaggtacatttgttacagtggatgagccaatattgacacattattaactaaagtccattgtccacactagggttcatcttcgttttgtgcattctatgggttttgacacatgtatagtgatacacatctaccattacagtatcctacagaataatttcatggctctaaaaatcctctgtgttccatctattcatcccctccttcttcccaccccaacccctggcaaccatttatctttttactgtctccatagttttgccttgtctaaaatgtcatatagttggaatcatatagtatgcagtcttttcagattggcttctttctcttagcaatacatatttaaagttcttccatgtctttttgtggcttgatagctcatttaattttggtactgagtaacatttcattgtttggatgtgccattgtttatccattcacttattgaaggacatcttgtttgcctctaggttctggcaattatgaataaagctgctatcaacattcatgtgcaggtttttgtgtgtatgtaagtttttaactcatttggataaataccaaggagttgtgattgctagatggtatggtaagagtacgtttagttttggaagaagcttccaaattgtcttccaaagtggctgtaccattttgcatttgcaccagcattgaatgagagttctttttgctccacatctttgccagcatgtggtcttgtcagtgtttttggattctggtatctaataggtatgtagtggtatttcatttttgttttcatatacaattcagcaatgacatatgatgttgagcatcttttcatctatttgccattatataacttctttgatgacgtgtgtattcagatcatctgaccattttttttaactgggtcatttgttttcacgttgttgagtttagacttgattttatagaactcttttgccaatgacatgaggcttaaacaagcacccttgcttgaccctggctagtgttgtccagaggccctcatgggtgaagtataattgcacagtttatgcatacattgtagcaaacatagcttaaagactcttcatccaggagctggtaacagagaaaagttgtctaagagacatagtccactgaaaggggtctttgaaaaggaggattctggccagtagatccaaagaagaaggctggcaaacgccaccttaaccaactgatccaagttaacatcagtgatgagacatcgacatcttgtccttctcgagcacgtacatcacttctggggaactctttcccaaaaaagcgcaacctgaatccaattagaaggaaatgtcagacaaaatgaaactgagggacattctacaaaacgactggccagtactttttaaatgtggtttgatcgtgaaagaaaaagaatgacagagaaccgtcctagattaaagggagactaaggagacacgacatgcaatgtatgatcctggattgaatcttggaacagaaaaggacccttagaggggcaattaatgaaatgtggtaagtgctgtagattagctaatcgcattatcccagtgcgagtgccctgtgtttgatcactgcactggcgttatatacaatgtcaatatttagagaagctggctgaagggttacggaaatctcttgtgctgtttttgcaacattttcgaaagtcctaaattatttcaattcaaatgaaaagtttaaaaaacaaaaattagaagttccagaaggccgcgcgccagccgctcctgcgggacgggacacccgggttctcctggtgggagcccccagtgccgttcacgttccgcccgggggggggattaaactcgcacgcgagaagcaccgcccccgctcccgccccgccccgctcctctccggccgcgcagccgctgccgcccacccgcacccgccgtcatgctccgggccgcgctgcccgcgctcctgctgccgttgctgggcctcgccgctgctgccgtcgcgggtaagcccttacgtagtccctcgccgggaccgtgcgcgaccgccttcgcccccttcccaacgcacgctcttcgtccccgcgcacccgagggcggcccgcagacgcaacacccggccggccatcccgcccttccctgcacgcccgtcccccgtgggtcctggctccgggtcacctctcacccgcctgccctcggggaggggaggtggccgagaataagggagggctctgtcttcctcggagtccacatcctcaccgcagaccccactccgcggggagggaacccccaaattaggccagttggccggagaactgagggacttggagtcgcacgacgggcgccgtttcagggcaatttcgggctgaaatgagaagcggggacgttggtggcgatttcccctgctggtgcgcggccggagtggggttgctgggatgggggtgggggccggaggaagtaggccctcttttgcaagcagcgctgtttgtctagttggttggtgttcaagttgtttaaacaggaaaacagttcagccaaataacccctggatggaagaggaacgggaataggcaaagcttggatttcactgaaatcaaggagttttaaagttctagtctgctgttgtgcaagtgacatctgaaaaatcacacacgtgatcattcatttacaaaacgactcgtgaggaaaatgcacaattctattgaccgtggtctttatttttaaaaaatttccatacaagcatgtcaaaaatatgtggatggggagactctggagaacacagacttccaaaaacaccactgactgaataattccaggaattaaagagcaaaataaacaagaactaaatgagtacttgtgtgggcttaaataaagtgcaagagatttaaataaaatgcaagagattccccccccccaccccttgccccagatttcactgcgtttttataataactgcctgctcgaagtctactgacaggaatatttcagtggacctcagtgttggaggcagcagcagctcagaacttggatacaaacccaaggttcctttcttgaaaacttctgtggacctgcatttatgactggttgtgacatctgctgcctatcaaaggggcagaaacaagatgtgcccatgttcacattgttcagactgggaacattaattttgtctaagacaaagctgggctgtctctgaaccctccttctgcacaccctcattttgcgagccagtaacatctcaactctcatgtaaaccaccctctgcgaggctgtgcatttgtactttaggctagtcgaattttcttgtcagatttttctttcttgtcagacttttaaagaaaatcagtttctagattttggtatgtctcttcttcagtgaagctgttttgaccagcaatagagggcaaatttccctttggaaatttttgtgcatttcctttgataagtccagtgtggatcaataggcttttcaagagctttagaaaagtgcatgatgaataaattaatgttaattaatcagctcctcccagtcaggaagctttaaggattaatttggaaatgagtgtgagctttgacctagctagttaaccaacttatctgcacttcagtaaaacagagataatacttactcatggggctattgggagcattaagtgggaactccacgtctagtccctattacaggcgtggttcatcttggtttccttccctttattctcttcatacaaaatgaagggtaattgttgcaaccagaaaacgtatgaataccaccttatgtatattggatgtttatggttactgaacacattcatatgtatgctaatgttatagggctgaaaaactaagtgtgtttttcataatactttacaaatctcccatccaagcaagatcaggggtcatatttggcttagaactaagtcaagaaagagtttgttgctgaataccaagatcttaatagaaaagctcttatgatgttgcataataaatatgggtattgcatataaatgtgatgttgaaacggaaatcattgttattgtctgtcattctggaggttattagtgaagtgatcttaaccttgttcttagctattattttgaaaatcacagtggacaaaacattctttaaattcctgagtgaaaatccatggcatcgctttaaaaagtttttccgtaagggtgcttaagcacataatagatgatcagtatgtatttatttggtcagtggtttcctatgcctggcatgagctgagtgaacaagcatgttccgagtaagtcctcattctgtgatcatcatgtggatcagaatctagggattttgaattgccatgtcctacaagccttagatgaggtgcctctgccttcttccctgatgtcatctcttaccacccttcctgccattcactctgtgtatccacagagtaaacagtatctgggtactccaacacctctggtccttctgtgcacaccaccttcccccagtccttggcatggctgcccccacctccaccattcagatctctgttcatatgtcaccttctccgaagcctccctgaacacccacattctctgtcacatgtccatgttttatcttttccaagcctttctgaatgcattgtgtttattcatctgtcttgcttgttgcttctcttaccaggggaaagaagctccataacagagattttaccatcttgtggatttttgttttgttttgatttgtgtctctgcactttattctaagttataataaaaggatgaaaaaatttaggtgagttatttaaaaagtaggtaggataagtggattgcaatttttttcaaattatattacctctgctatgcactcatttcataatgaattcaaagccttaaatcatcttaatctattgctgccaccttttctttctttctttttttttttttccgagatggagtctcactctgtcacccaggctggagtgcggtggcgcaatctcggctcacagcaacctctaccttctgggttcaagcaattctcctgcctcagcctcccgagtagctgggattacaggcatgcgccaccatgcctggctaacttttgtatttttagtagagatggggtttcaccatgttggccaggctggtctcaaactcctggcctcgtgatctgcccacctcggcctcccaaagtgctgggattacaggtgtgagccaccgtgcccggcctgatgccaccttttctgactcttgtgtatggcacagttatgtttcaggggaaattatctcagattaaatattagagtattttaaaataaattttgagctgggcgtggtggctcacgcctgtaatcccagcactttgggaggccgaggcgggtggatcacgaggtcaggagatcgagaccatcctggctaacacggtgaaaccctgtctctactaaaaatacaaaaaattagccgggcgtggtggcaggcacctgtggtcccagctactcaggaggctgaggcaggagaatggcgtgaacccaggagacagagcttgcagtgagctgagatcgcgccactgcactccagcctgggcgacagagcgagactcagtctcaaaataaataaatgaataaataaataaataaataaataaataaattaattaattttgaaatgttaatgtttatttttcttccaatgaaaaagtgaaatttcaattaggtattatttcaggacttcttttactgttgagaatcttttaacaatttgcttatgtgttgaaaactagttttgcagcaaggttactttccataatttttattgtgcatatcaagtatttcattccttctgtgggttatttagtgtttttttttttattattttattttattttattttattttattttattgttttgagacagggcctcactctgtcacccaggctagagtgcagtggtgcaatcatggctcactacagccttgacctgctgggctcaagtgatcctcccacctcagccccctgagtagctgggactacaggtgcatgccaccatgccctgctaattttttttttttttttttgtagaggtggggtctcactttgttgcccaggctagtcccaaactcctgagctcaagtgatcctcctacctcagccttccaaagctctgggattacaggtgtgaactgccacgcctggcctattttagattttgagagcaaatcttgagaccaaatctttaaaaaatagaccagtgatgcccaaagagaaaggtacagattaacaatggcacaccccttctatgaatatacattataacagcccttctgaagagggaagtgatgggacaatatggagatggatgtcttgaaagctagattgggaagagtgatatggagaggggatgaggtgtcagagtgcctcaatttatttgggattcagagagatcttgaagctcagagtacagccacagaatctctggattagtcagggacttggaacagccactccctcctccatacattataaatgtaataaatagcccctcttcttcatctgtctgtgccacagttgcccttgcggaagttatgtgactacaactcatatcttaatgggagaggagcaaaggtcttattattgacaatgaaaatgaaaaagaagtctttcccttttcctttgttaacatttagaacaagtatgtcccaagaatcacttcctcatgctgtgcctgttttttttttctttttttaaaaaaaagagagacagagaacttataaaggaacagagagttctattagatttgactggtaatgcaaagtattcctgtggatatgacattatcttcttttagcacatgataattttaggcagaggatctatatagaaacttttggagttatgctaagtacagcttttaaaatattcatgaggctcctgaatttctgtacgtattaaagaattataaaattataaaatccctaagagtcatttaagtgcattattaataacaacctatcattcaggactgctgtgaagaaataagagtaataggccctttgcagagagcttagtgggcaggtttttaattatattaggattatggcaaagatacttagcgttgaagacgacttagtttagtcttttgttcatgaggtgcatgaacgtcaacaatctcctcacaggagttatccagcctctatttgagcactgttcttctcaaagtaaaaatatatcttttgagtagtgcttaaaacttgtttctggggcacacactctgatcggggatctatagcatgagaaaaggggttccatgttgaattaactggagttactgctaatgctgaaatgagcctaaggagaaggcagttgaaagttttggggaagtgagtcaacagtctgttttctatttttctatacataccctgttaaaaaaaaatttttttttggtcttgtcacatgcagatgctcctcgacttagaatggggctatatcccaataaacttgtgaagtcaaaaaatcgtaagttgtccattattaagttcgggaccatttctgtattgctaacttagttattcagcaatggtctttgagtagctggttatcattatcatcatcatagtcattcccatactgtgcaacacagtagcattgtgtttgctcctccctctgtttgcctgaaatatccatgtgacttctttccctatcttttcagacacacacacacacacacacacacacacacacacacacacacacagagttggttctctgtttctctggagaaccctgactaatacaataaccaataagatagtatggaaataagacagtgtgacaatcaaggctggattgtatgaagcattgcatatccacctttgccctcctttgaatcactcactctgggggaagctacctgccatgtcataaggaccctcaagcacccctgtgtagaagtccacgtggtgaggaactgtggtgtcctgcccacagccagcaccagctcaccacccatatgagtgaggcttcttgaagctgacctttcagctccagttcagtgtttagatggctgcagccctagccagcatcttcactgtaacttcatggagaccccaagccagaatcacccagacaagcaactgcttcagaattcctgacccagagaaactgtatataataagtgtttcttgttttaagctgctaattttttacatagcaatagaccacaatacaccatctaacatattattttatgtatttgtcttccttttgcataactgcgtcaactagaacataaatttccaggagggcaggaatttcttttcctttttgttcactgtggaatctcaagcaccttgcacaattttttaacagcaccccctcagataggtactgttattcccattatacagatgaggaaactgggacacagtaaggttaaataacatgtccacgattgtgtagtcagagccagacttttctccacagtctaatgggcttaaccagagtcctgtattgacccacttctatgcatcccttccagtgttatgttcaagacagaaggatagttattattgagagtagttagatctcagacatggtctctgctgtcgtggcgttaacaatcatttgggaaaacaggatgcatatcagatagccgctatataaagaaggatctaatgagtgctatgtaaacatgtataggccatcagagggtaacacatttccttttccaaagaagaatgactacccatagttcttatgatttgtgccatattatttttaaaaccctagacacaactaattggaataaggataatttccttagtcaaaagctggctactctaggctaggcatcagcccaatatggggcctagtatatgaacgctaagcctatttgactgttgagatagtatcctcagttttcttattggccatgtatctgtacaataaatctatcatctggtagcctgagcatgtctttagtccttgttgccagaaaaggtctctcatgcataatgcagtttaaaagtcctacagatgttcaaaggagtcacaggttagaggaagataaggctgagacacttcatggagaattgacacatgagctgccactgaaataagaatataccttaatcagtgttttagagatcatatcttcagatcgttttaatttataaagtataagaactacatgttttcacagcatgccaggagcaaaagatgaaaaaaagaactataagtgcttgacttgagtgttgattatatttttgtggacttattagacattttattttatataaatggtgtttcaaaaattaattcatttttatatattgtcgagttatttgttataagtagaaaacactatctgtagttttgactagaaataatacaaaagtgcatttctgaacctgtggttcaataattgccaatgatttataaaagtgtttcaggtgtcattcagtgtggtaatgcagttccatttcacttttttaaaattccataaggtaaaagaaaaagagcaataaaaggaaccagaagaaagtaaaaagggaaaaaagaagagaaagaataatcaaaatttgcaatttagagcctctgcccttttgactttcagtttgagttttattctggaaatgacttctgtgtcctctgtcatgtctctggcagcagagaggggaaggagggaagaaacctgcctttttatcctagttcactcattcaatgaatatttatggagaccttactaggtacctgtaactgtgctttttatcatatgccctctgcctggattttttttttctttttccttttatccgtggcaacttcctatttatccagtgagctgtagcttaaatattgcctactttttgaaatgctcacttattctacaaagttatactctccttctcctacatctcatagcattttacctatcctaccttcggaatatctgtttgtctgtccgactcttccatcagactgaccacttcaagtgtagaagacttttactctttttctcatcaccccttaacactaagcattatacctaacacataggagttgctcagcaaatgtctgatatggatgatgggtagatgggtgaccaactgttgacaacttgttgaaaagtataaaagatggaattttgcatctggctatcatggagtaggagactaacactcccattaagaacaactagaaaatctagattaaattccataagaatcgtatttgctggcatcagagagctgctaaggcagtttgctgaggtgagcccaacagtctgtgtattacttttctccttaggagagctggtaaaatcttaaatagctaaaagcagagcagagtttttggcaatctcatagtgttgaggaaagaaaaaacatgagtcttagctcaccaaagaggaggtggctctagttaatatccaggctttcaactggcaatccctacggatcaaaagtctacaaagtctagaacacctcttcacatagactcagtccctgctgatcagaatcctttctaaaggaagataacatcatttagagttactacaatttttcatacacagtgtttggcatttgatagaaaactaccagacagaacaaaaaaaaaaaacaggcctaagggggtgtgagggtgcagggtaggagagtagagaacagactaataactgacctagaaattagagttttcagaaatggacttcaaaataactacgataagttaaagaatataaatactaagattgagaattttaaaatataatcaaattgaaattttaaaaatataatcaagttgaaattctataactgaaaaatcactgacattataaactcaatagatggggtttaacagcatgaaaaactgaagtaggctgggcacagtgactcacgcctgtaatcccagcactttgggaggccaaggtaggaggattgcttgagaccaagagttcaagaccagcctgggcaatatagtgacacccctgtctctacaaaaaaaaaaatcaaacaaattagccatcctgtctactcaggaggctgaggtgggaggatcacctgagcccaggagttcaaggctgcaatgagctatgaccatgccattgtaccccagcctgggtgacagagagagatcttgtcttaaaaaaaaaaaaattggagttacccttaccccagttaagttacaacttaagagtgcattaataaaccaggaagaatgagattatattatggagagtattaacagtattgaaaagagcaaaaggatatacaggacatggtaaaaagtctaacatagatgtaattttggtcccagaaagggaagagagagagaatggagcaaaagtagcatctgaaatgataatggccaagaacttttcaaaagtgaccaatgaaaataagccacagattcagaaagtgcattgaattcttagcaggatttaaaaacactaaaacaacagcatgccactgtaaaactgctaaaaaccgaagacaaagaaaatcttgaaagcagcaagaagggggaaaagcacattactgtccaaaaagcaacagtgagactgacagttaacttctcagtagaaatgatggaagcccaagcaacaaaactatagtgattcattgcttaattaacaacagggatacattttgagaaatgcaatttttcattaggcaattttgtcattgtgcaaacatcgtagagtgtacttacacaaacctagatggtatgcctactacacacctaggccacgtgctggagcctattgctctgcagtaacttgcggaacctgtatggcatgttgctatactgaatactgtaggcaattgtagcacaacataagtatttgtgtttctaaacatagcaaaagcacagtaaaaataatggtattataacctcatgggaaccctgccatatatagtctatcattgaccaagatgtcattatatggtgcatgactatgtacatcttaaatgaaagataagctgccattctacaattctgtatttgcaaagatagccatcaaacatgaagacagtataaagaccttttttctttttctttttttttttttgagacggagtctcactctgttgtcaggctggagtgcagtggtgcaatcttggctcactgcaacctccgcctcctgggttcaagtgattctcctgcctcaggctccccaatagctgggattacaggcacccgccaccacacccagctaattttttgtattttttagtagagacaggttttcaccatgttggccaggctggtctcaaattcctgacctcaggtgatccacccacctcggtgctgggattacaggcgtgagccactgtgcctggtggagacatttatagagtatcaagaactgagggagtttccagtagacctgcacttaaagaaacaccaaagagatttctttaggcaaatggaaaattatcccagtcagtaatacagaaatgcgagaaggaatgaagagcaacagagagggtaaatatgtatttaaatctaaaagaacaccggccaggcaaaacagtaataaaacaataagataaaggaaaggaagccaatgaaattaaaatattgtatgtttctaggactgcctaggaagtggtaaaagtactgatttatttgaggtattaataaatcaaggtcacatattataattttcagggtagctactacagaaaaaaaattaaagaatatataattaacaagctaaaagaaaaaggatcaaatataaaatgtttaatacaaaaaagacaataaatgagaaaaaaggaacataaaataagtaggacaaatgaaaaacaaatattaagatggtagatataaactccaattcatcgtaactacattaagtattactggaaatacttcaattaaaagacaaaggtgatcaagctggatttaaaaaaaaactacttgctgcttgcaagaattataactacttagaaaaagtgtttggcagtatctgtgaaagctgggcacatgcatactcgatggccccagcaatctacttctacaaaggtactcacaagaagtatgcatagaatgtttaaagcagcattacaatggccacaaactagaaactacccaaatattcatcaacagaagaatgaataagttcttagataagtcttaaataaaatgatttttaaagtaacatttatcaaaagaagccagacacaaaagagtacacaatgtatgattccataactataaagttcaaaaacaggcaaaactaatcgatggtgttagaagttaggttagagatgacctttggaagggatggtgagcaaaaggggttaatgttctgttcctcattcctctgataattatatgggtatgtttactttataaaaaattcaccaaaaaataaaagaaaaaagaaaaaaattcaccaacctgtatatttatgacttgtgcattgcatgtatgttttatttgaataaaaagtttagtttttaaaaagtgtatcaggaaaggtattagaattggcagcaaggtcaattcagttatattttagtatgtaagaaacttggccgggcgcagtggctcatgcctgtaatcccagcactttgggaggccaaggtggcccaatcaccagaggtcaggagttcaagaccagcctaaccaacatggtgaaaccctgtctctactaaaaatacaaaaattagctgggtgtggtggcgggagcctgtaatcccagctattggggaggctgaggcaggagaatcacttgaacccaggaggcagaggttgcattgagctgagatcgcgccactgccctccagcctgggcgacagagtgagactctgtctcaaaaaaaaaaaaaaaaaaagaaaaagacaacatgcttcaagaaggaaaggttgaacccacagggaaagggagtgtttgaagatgctgaagagatgataaattaagctacttaaggacaaataagaggattcattcattcagctgaatattttaagtccctattataatccaagagctatctgaggtgttaggaatccaaaaattaataaggcttagtccctatttttagagtggtcactgtccaggagcaaaagatgccaatgatgatgtctgtaaaaactacatatttttaatactttccttgtacgagacactgtgctgtgcaggtttgcagtatcttacctgatatttacaacaatccaatgaggtagatgttatctcccttttcctgatgaaacacaggaaataatataagttttccaaggtctcaccaccaagataaaaacataagtctgtctgacgttaaagccgtgttcctgctggtactttacactgccattggatggtgtgtggttacatgcaacagtcacaatcaattctagtggggatgtcttggagaaggtggtatagatggcctgagcctcaaaggatgagcagacagagaataatgtttgatggcctggaagtggatttgaaggaagaagagtcttttctctgaataaaggccagattttcaaagaaggtggcagaaatgtataatgaacctgagacgactgagtgctgtttctcagggaaaggatctacctgctccatatacagactttcaaccaagtgtcttgttttcagaccttcctcctacaaagctgtctggcgtctccaattcctgactctgttctggacttctttgctttgtaaatgttggtatcatgtaattttatagccagattgttttaatgtttcataatgaacattttcccaaagcaaactgcttgttgcaaaacaaccgtatctttaagccagcattgtgggagagttctagattcctgccagagttaaacccaaggtagtcatatgtgtaattcaagtgctcataaaacagctggaaggaaaaaaaatttggatataaaataaattataggtggggcacagtggctctcacttgtaatcccagcacttcggaagcccaaggtgggagaattgctgagcccaggagttccagagcagcctgggcaacatagcaagaccttgtctctacaaaaaaattaaaaaattagccgggtgtagtgttgtgtacctgtaatcccagctactcaggaggcggaggcacaagaatcacttgagcctgggaggcggaggttgcagtgagccaaggtcatgccactgcactctagcctgggtgacagagtaagactctgtctcaaaaaaaaaaaaaaaaaaaagtctgtacggatacagggagcacactgcttccttttaaaggcaagaccgctatgttgaacattccacttctgctaaaccctaattatccagaagttataagactgcgaagcaatctagcttggtggccatgtgctctgtgctatataagaagctgaggtcagtactggggacaaccaatgctctctgccatattctgagcttagtaaacttgagagtgttgaattaatttagattaatgtagctgattggtaaattctgatctttgtggtagggcttgcttctacttgtttatattaaaaaggtaatgcagaacttaggcctggcgtggtggctcacacctgttattccagcagtttaagagaccaaggcgggtggatcgcttgtgcttaggagtttgagaccagcctgggcaacgtggcgaaaccttgtctctacaaaaaatacaaaagttagccgggcatggtggcacatacctgcagtcccagctacacggaacgctgaggtgggaggatcccttgagcccaggaggcagaggctgcagtgagctgagatcgcgccactgcactccagccaggacgacagtacaagatcttgtctcaaaaaaaaaaaaaaaaaaaaaaaaaaagcagaacttaaaacataaaattgctacatatttatatagatgaaatcactaagatttttacctatatacaaacctaacagaatatggacgcttactgctttgtacttctttattcactggaattaagtaaaattctctttccattttggccagtgaaatcaactcttgcagggttacttttgcttttaatactaaccaattaaattctagagcctaggcttaaaaatgcaaatctttataataaaaagagactaagatagaggtgaaggagatgtccctttagagcagtagaggaagagttatggttctatttcattgaactacctcaaataatctactttgatgaggtgttaaattaagaacattcataagaacatcaatcttgttttcctgtgcaatatgaaaacttgtgtgaatatttataggctagcaacttgtttttcttttctctgttcttggaggtataatttgaacaacagggccttgtaaaagtcttaagacttttgaaattgttaaatactgcaaagataaccttcaaagagaagtgtgtaatcctgattggctgtcttctagatagtttgttgccttggtgataacactaatttacatgtctgaattcctaaacaacctaaaaacttgtatctttgctctgtaaagtcagaagagaatcattggcacatttctcttttcccgtatgaataatggagagaaacaaattcctgttacactggttgatttcttattttaataaagatttaacaaaggaaattgcctttgtgtgtgtgtgaaaatttagtatctaatatccttatctttgggaattcatgtaattctttttctcaagttatttaacagtgttcttcttttttctacatagactgtccttcatctacttggattcagttccaagacagttgttacatttttctccaagaagccatcaaagtagaaagcatagaggatgtcagaaatcagtgtactgaccatggtaaaaggcttattcttttctgtttgttttttcacaaattagtgaacagtgttcattaatttctttaaaaattgattttgtcacatctgacttttaactgggtcctgagatttaatgtacaacttttatttgacaacacacaagctacaggcagtggaattgggtatatatttaatcctggagttggaagacagttgttggacaatattgtccaaagcagggtctatttaacatgcatatcctgtgccaggcactgtgcttaagcacctcatatactttacctggctttatcataacaaacctatcaagtagtgtattattatcattttattgagagatgaaattaacttcagttatttgttcaagcttacacaggaaataattgacaaagccaggattttaacccagatctgttggattttaggcttagagttcttaatcacttagttattctgcctggaaagtgctgaagtcagattacataggaccatgaagtaagactgtagtaaagaagagtacattaaggaaaaattataaaaaggctatttgctagaccatacactcagtgttctctaggaaatagatttataacatcacattgtaaaatatttgaagtgtctttttttttttttttgagacagggtcttgctgtgtcccccaggcttgagtgcagtggcatgatcatagctcactacagccttgaactcctgggttcaagtgatcctcccatgtcagccccctgaatagacaggactacaggcgtgcgctagctattttatctgtttgtttgtagagacagggtttcactatgttgcccaggctggtctgaaactcttggcctcaagtgatcctctcaccttggccttccaaggtgctgggattacaggtgtgagccactgcatccagccaaaaaaatgtctttttttttttttttttttttttttgtgagatggagtctcgctctgtcgcctaggctggagtgcagtggcgtgatctcggctcactgcaagctgcgcctcccgggttcacgccattctcctgcctcagcctcccgagtagctgggattaccagcgcccaccaataggcccggctaattttttgtgtttttagtagagacggggtttcactgttggccaggatggtctcgtctcctgaccttgtgatcaggatcaagtgattctcctgcctcagcctcccgagtagctgagattacaggggtgcatcaccacacctggctaattttttgtatttttagtagaaacaaggtttcaccacgttaaccaggctggtgccgaactcctgaggtcaggcaatccacctgcctcagcctcccaaagtgctgggattacaggtgtgagccaccatgcccagcctaaaggtgctttttattactgttatattcttcaacaataacatttggaagaatgtatcaaattgtactagggataccttaatcaaaatcatatacatttattatagaaggaataaatgtaaacaccaaagttattaatcttattaaagcgccacatagtacttaatacatatatgttgtttccctttgaaaaagtcttacatgaacattggctctgtgaaaacaagacgaaatttccaacatgccaatatggttttatttcaaggcagttgaaataaaataatagcaattttgctggtcttagaatatttttaaaacaagttttcccctgcaactattttctttcctttcttcctttttcttcttcctcttttctttctttctctctcttttcatttgttctttctttctttcccttttttttttttaatggagtctcagtctgttgcccaggctggagtgcagtggtgtgatctcagctcattgcaacctctacctcctgggttcaagcaattctcctgcctcagcctcctgagtagctgggattacaggtgggtgccaccagacccaactaattttattttattttatttttttttggtagggacaggatttcgtcatgttggccaggctggtctcaaactcctgacctcaggtgatccacccgcctcagcctcccaaagtgctgggattacaggcatgagccaccacgcccagcccctacaactattttccatcccttaaaaaaaattatgtaaagtatactgagacataaacataatttcaatgacataaatcatattagaggctgagagccaagacatgtccctgtaaccttattagcttgtatgaactgtaagatcaaagtttattgtccagctctaatatatatagaaagttaagcaactatttattatttttatgtacctagtgattttcactgattctggaatatgctgactttttttctctttaaaataatttcaggagcggacatgataagcatacataatgaagaagaaaatgcttttatactggatactttgaaaaagcaatggaaaggcccagatgatatcctactaggcatgttttatgacacagatggtaagtgatatttacctcgtgggacgtgactttgttgttctttttttaatgtagcaaaactgatggcttttcaattctctggttcaagttgatgattcctgtggcctccaggtgttaaattttcagtgtgcacctatgatcataccacagcttgtatctgcatagctcaatgagttacacagatgaaagccacagttgattcttgtctggattaaaatgtggctctaaggctcagtatttttgtaatatagcatgatcataaaggtaagtattagtgtctgcaactaataggctaaggatagactaaattatcacggttctattatataaacatatttatcattactgtagacaaagtacatatgtacaaatataaaagtacatatgtaaacattttcaaatgaaatgaaattactaaggttactattaatatttaactatttttcttgacttttttcccatgagaatattatacatgtatatatttttgcgaaaattggatcatcttcagaaacctcttaaatcgatagcttttgatgatttggctgtacacaggatatattcctccttctaattttaatcctacaatcagaagtttagaccagacataccttagtaactttccacctttaatcctacaccctttttggcttgaactccttttaaaactgtcataatgttgaaaatattccttaattgacagatgcgagtttcaagtggtttgataattcaaatatgacatttgataagtggacagaccaagatgatgatgaggatttagttgacacctgtgcttttctgcacatcaagacaggtgaatggaaaaaaggaaattgtgaagtttcttctgtggaaggaacactatgcaaaacagctagtaagtatgaccgaaggtgtttttccattctagaaggggcagagaaagtaggactggttttaaaataattttgagataagtgtgcctcaataaatagaataaggctaggcacagtggctcacgcctgcaatcccagcattatggtaaactgaggcactggattgcttgagcgcaggagttgaagaccagcttgagcaacatggcgaaaactcatctctacaaaaaatacaaaaatcagctgggcatggtggcgtgcacctgcggtccgaaatacatgggagcctgaggtgggaggatcaattgagcctgggaggttgaggctgcagtaagcctgggcaacagagcaacactctgtctcaaaaagaaaaaaaaaaatagagggaataagacttcagaatatattaataggatggtttgctcttaagtctcttggaactcaaattgtaattctcttacatttaggaggtaaggccagatcacatgaaataggcatacttttattctgtctgcttagtgtttccaagaggtcaaaaatttcttgttcagaggaattattataatctctttgcatgtgatttgagtgagcagaagtggtgaagagtaatcatgtataattccagaattctcgtgttactttacaaggaattagattctccataagaacatcctttgtttaggcaaacaaaaactacatcatagtttataatttatttggaattaaaatgttttcttctgacccgtcagaaggttttttttttttttttttttttttttgcgatgcagtctctctctgtcgcccaggctggagtgcggtggcgcgatcttggctcactgcaacctctgcctcctggcttcaagcgattctcctgcctcagcctcccaagtagctgggactacaggcacccgccaccatgcccggctaatttttgtattttttagtagagatggggtttcaccatattggccaggctggtctcgaactcctgaccttgtgatctgcccacctcagcctcccaaagtgttaggattacagacgtgagccactgtgcccggcccagaaggttttttaatgaacagaagttatcctggcccacaacagtattttgatgttatttgttaaaacactacacagtttgttattctaagttttagaaagtaactgttttctcattaaagaaaattaaattttcaaaatgtgggctgggtacagtggctcatgcttgtaatcccagcactttttgaggctgaggcagcctgggtcaacatagcaagaccaccatctctacaaaaaaagtttttagtttttttaatgtttcaaaatatgaatttagggtgcttaaaacatgatataaacaaccatttccccattttgcatcctcagtattttccccttctacttcaactgtaaaccaaaactccacatcctgctttatttcctttctttacatatggaagtatgtacatttctttacttgctacagcaggatccttgactactgttagttttacagtgattatcaaaatgttcgtcatagttttatggtagcagtattcaacttcaaatatttgttttttaaaaaattggttcttttcaggttctgcacctcagggtgccattacataaacaaagtttttaattaaactataacttcaaaacatcagaaatagtgagtacatccatactaaggtagttagggtcacagttgtttaattttatgacatttgttttctagactctccaaccagaatcctcttttttcctttacctcattattgtcttttcctcaagatcccgtattcttttccaccaaccaagctaatgcatgttgttagccctctacatctttctttaaaaactaagttcaaaatagacaacagagacaactaatgaggcaaagaaatatggattttaggctatgaatatattgatattaagctactaataaaagggtttatttttaatgattgtgaacatgtttaaagtcaatcctataataaagcataattaaattctaatttttattttcttttgtattttagtcccatacaaaaggaaatatttatcaggtaagtaatgatttggtctttaaatttttcccacaattaaaaatatatcaaaattctggcatattaaaatacattacagatccctttttaaaattatgtaatataaagtagaacaatttttataagaatgtagaaaggtctcttagtaataagactcaacattttaaatatattctacaatatgtagttttgtctggcttcttttactcgggaatatttttttagattcatctgtgttgtgcacattcactgaattttttccctaagtgtcataatactttataaatatatcatatattgtccattctcttgtttatggatatttggatcacttctagttttaaactaatttgaatagaactgcctatgaacattctcccacatcttcttttggacctatgttctcattttctttgagtatattctagaaagtagaaagctgggtcatagggcaagtatatatatttagatttattagaaaccaccaaataatttttcaaaatgcttgaatcatgttactactggcagtgcgtccaagttccatttgctccatgttcatcccatgatggtattgtcaatttatttttagccattcagatcaggtgtgtagtgatcttcttgtggctttaattttcatttacctgataatgatgttgagcacctttcagatgattatttatttgtatatcttttgtgaaaaggcttttacccatttgcggagtgcagtggtgtgagcttgactcaccgcagtcttgacctcctgggctcaagcgatacttccacctcagcctcccaagtagctgggactacaggtgtgggccgccatgcccagctaactttttttgtacagatggagtttcaccatgttacccaggctagtctcaaactcctgggttcaaaggatccacccgcctcagcctcccaaagtgctgagattacaggcgttgggccgccatgcccagccacccatattttttttgagttgcctatatttttggtaggaatttttaaaacaaattttgtttctttaaatttggatatgggccgggctaaataatacaaaacttagccgggcacggtggcgggcgcctgtaatcccggctacttgggaggttgaggcagggagaattgcatgaatttgggaggcggaggttgcagtgagccgagatcacgccactgccctccagcctcggcgacagagtgactccatctcacaaaaaaaaaaaaaaaaaaaaaaaaattggatgtgagtcctttgccagttttctatttgggggttactacgatagaactatgacagaggaggagaaaagaagtgttgggtttgtgtgtatacaggaattacatcctcattaatctataggaagaagacaataaataacaagcattagtgtggatatgcagcaattggaactcttgtggtaggaatgtaaaatggtgcagcctctgtgaaaaacagtgtggtggttcttcaaaaaaaattattaaaagaattaccgtatgatccagcaattctgagtatgtatcccaaataactgaaagcaaggactctttaatatccgtacacccatctgtttgatatttgtgtatctatgttcatagcatcatttgccatagccaaaaggtggaagcaacccaagtgtccactgatgaagggataaacaaaatgtaatctgcacatacaactgagtatcatttagccttaaaagagaagaaaattctgacacgtgctacaacatgcataaacctgaaggacattaggctaaacaaaataagccaggcacaggccgggcgcagtggctcacgcctgtaatcccagcactttgggaggctgagaccggtggatcacctgaggtcaggagtttgagaccagcctggccaacatggcgaaatcccgactctactttaaaaaaaaaaaaaaaaaagttgaaacccggaggcagaggctgcagtgagccgggatcactccactgcactccagcctgggcgagacagagcaagcctccatctaaaacaaaacaaaacaaaaccaccacaaaaaaaaaagaaaaataagccagtcataaaaggccaaattctgtataattcttacctatagtatgaggtacctaaagtagtcaacctcaccaagaaactctttgccaagggttaggtcaggaagaaatgggagtttaataggtacagtttccattttacaaaatgagttgttctgtgaatggatggtggtgatgtagcacaacgaagtgaatgtacttaatgctactgcacacctaagatggtatttgttacatgtatttctttaaattacatttttaaaaaatcaagcagcggaagcatgttatttagacatggagacagataaatagctgaagcaacagtagtagttaactttaaggaatggatgttcaggtgagtagtggagcaggagcacagtattttcactacgtatcttctagaactatgacttttaagctacgtaaatgtattactttggaaaaaataaagatacacataagttggaacatttagaaaaaaataggtctgtggcttcaaaaacgaatagttgaaagatctggcaacatatggtcttcagactacaagaaaagtaatctctgaattcattacatgtatgcatgtatatatgtgcatgtaaatctgtattaaatatgtgtatgtaatttagtgagtaaacactatgtgtcaggctttctcctaaagttagacattgaagacagagcaatgaacaaaacaaaagcctctgctctcaagcatacattctagtgggaagggtaaaacaaaactatgtgagatggtgacacatcctatagggaaaacaggcagataaggatgaattccagtgcaagaagggaggtgttgcactttatttttatttttagtacagtggccagggaaggcctcatttaataaggccatgattttgcataatgaagacctaaagtcaaagtgaaagcctgtcatgtagatagggattaggcttagtctgactttaaggagtaaaacagtagagaacatggagttgaagcagcaaggaaacaacccaacagttaagtgtagctgccatcttggcaaacagggagttccccttcataccaagggtaagctggaagactcccttgggaagaatactttcaacagaattaaggtgtccatagtcggatgcacctagtgtggcaagcacacaggaaaggtcaagttagtccaagctgggttcagcaaaggttactggagaggatgcaggagttaaatcttcaaggataagtagacatcaggcaggagacagaggacaggttatctgaggtgacaaatcaggaccaaggtgaagggttgaatttttgctgtcacttactaaatggacttgggcaagtcatttaaaccctgtgcctcagaattaaatgcacagttggcactctcacctgaggctacagcctaacaaaatgtttcatatagtttttgaggtggattatgtatagttcgggcctcagatgatcagtgttagaactagagcgttaaggtagcagtcagatagataaataggaaacagaagaaaaatgtgtagtcttcacaatttatagagaggaagtctataaatttccagattggttgactggacagtggctatttatttgcaggaattcaggttagaagaaatttggaagtagggctacacacacatatttatctatggatttacataaaagacttgaatggttgagatcaaccatggaaagctttgagtccacaaagatgactaggaagcagtcgtctgaaaaatagagcagtcagggaagccaagtgagtaggagataacttcaaggctggacggctaacaatctagttgccccaggatgaactaaaacatccacgtgtttaagcatgtagtcataaagagatcattggtgacctctgccacagaaatttctgaagaaatgttgagaaaatggattaaatgggcttaagaaatgaaaaagtgagcttgtttcagtgtttgctgtttcctcaagtaaggaacattgttaggctaaaaagtatttttcctaaattttgtttctttaaaaaaaacaggatttcatggtaaatagctattatatgctgtcaagcaagcaatggacctttcctttaattaatgaggtagataatacatttcctaatgtaaaactatcctaacctccagatataaactacacattgttttaatacactgcttatcagttgccttgacaattgactttgtcacacattttagtagtatgcagctagctaactaaaacccctggaggcaactttggctaaaggtcacttgcagaatgtgaaaagcagcatatatacttactgtgtctcgcccatcttggacactgtccagttcttaggatacccggtcttttaaagctattatgattgagtctgtaaatatttctcaattactatgatctttcagacttttctatattactatcatgtaattcctatttaaagtagatgctaccgattatgaagccattattgtacaatcattagtacactgaaataaagtgtgttcacactggtaaagttgaggttctacactgaaaatggactatgttaattctaataaaactaactacggggctgggcacggtggcccacacctgtaatcccagcactctgggaggccgaggggggcagatcacttgaagccaggggtttcggaccaacctgggcaacatggcaaaactgtctctactaaaaatacaaaaattagctggacatcatggcgtgcgcctgtcatctcagctacccaggctgacacatgagaatccctggcacccagaaggcggaggttgccgtagccaaaaactatggaagaaccccatttgaactcagtttacggaattcttggctttttttcattttaatgtctttaataataccaccaccaaatccaccctcacaccttaccaaatctttactaccaaattttatttcagaattaaaaagatagttcacttggggccatttcctcactcctcccaaaaaatcctgtcaatatttgaaaagtatcaatggctctccctcactttaacaaataatttggccaaatttctctcactaatcttaaattcttccaggtctcattttaacaagcaccagttgaaataatgggtattatgaatatatttaataataaaaaatctgtcaaaataattctgaaaagttttcacattctttagagtcgattactatacataatacaagtacctgcccaaaagtatgtttgttctcctaaaccaggttattttcctcaatttattaaactggattcttatagaaagattacaagggtttgaataggcaagaactgcaaagttgtgcatacttacagaaatttagggaaacacacaaagaatgaatgaatgcaaagacacacaaaaccaggtactttactgcaggtcttggtgtttttttcagttaaacaaatcttaaatccccaaagccaggtgaaccattaaacctcaataatgtaacacattatctaaatactagaattcctaaagggaacagtaggtctgaatttgtagtcttagatcagaaagtaaagcgaaggaagacaaactggagcatggtatatacttgcgtgatttccactatggggtcttcagtagagtggagaagtgcacaacttcctagaaaatttgagtactattcttcaggctaagaaatataaatcttgttagtaacaaatgcgaaatttttggttttctcatcagtgtgggaaattctcaacacagagaaatgtttacacaaaactacagttgtgctcatcaaaatatacttgcaacttgtgtaccctaatttcccaaatactcttttgtcttttccttttcagataaccacattttaatatcagcattggtgattgctagcacggtaattttgacagttttgggagcaatcatttggttcctgtacaaaaaacattctgattctcgtttcaccacagttttttcaaccgcaccccaatcaccttataatgaagactgtgttttggtagttggagaagaaaatgaatatcctgttcaatttgactaa

SEQ ID NO: 568 - DNA, 317808 bp, Homo sapiens
gggcgagcgcctccgtccccggatgtgagctccggctgcccgcggtcccgagccagcggcggcgcgggcggcggcggcgggcaccgggcaccgcggcgggcgggcagacgggcgggcatggggggagcgccgagcggccccggcggccgggccggcatcaccgcggcgtctctccgctagaggaggggacaagccagttctcctttgcagcaaaaaattacatgtatatattattaagataatatatacattggattttatttttttaaaaagtttattttgctccatttttgaaaaagagagagcttgggtggcgagcggttttttttttaaatcaattatccttattttctgttatttgtccccgtccctccccacccccctgctgaagcgagaataagggcagggaccgcggctcctacctcttggtgatccccttccccattccgcccccgcctcaacgcccagcacagtgccctgcacacagtagtcgctcaataaatgttcgtggatgatgatgatgatgatgatgaaaaaaatgcagcatcaacggcagcagcaagcggaccacgcgaacggtgagcagccagagcccgggcacccgctgccaaatccgatcctgtcatggtcctccagccccctcccccttccccgcggcgctggatgggttgagggggttggagagggtgctgccagctcggtgtcgtctacacagagaggggacatgcgtgacagccactccgcgctcccctccaggccctgaatgtcagagttaattctgcatttgtggggtgggggcggccgtggagtgtgtggagcgcggtgcagccggaggggcggcgagtcggggtgattcgggttcagtgtcctcgggctcaactttccttcaacgcccccgagcgatggcaggagggccgcaagtcttcagccggagcccccttgccagcctcttctcgccttccactcctcccccgccccctcgttgactaggaagaaggtccctggtggcatccggaaaattctaggattgcccggtttcgccctccgcgccggtgggtgaagcacacccatcccctcgcgggggaggcccggcctcggtatcggggaaaggggttcgggtggagcgtgcgttcccgctcccgtcgccggctgtgcacacgtcggtaacctagcaatgcccggggagccgctgccgctgtggggctcccctccccagctctggcccgggcaccacgtgcagcttccacgccggccggggctgggtcgagggaggatggagcagctcctggccagccctcccctttggagaccgccagtgccccccaacccctgtcggctggaagcctttccgggtgagcgctcccctagggagaagcttgacatgactcgactcgtccccgctccgattgcccgccgctcgcccgctttgccctcttctcaggctttcagacccgtgcttgctttgactctttacttagcaataattggctttgcaaacgcccatctctctaccttgctgtcacctctctcacttctgcttcagtgaggagactgtggcggaaggcggcaggtgcctgggagatctgcctgggagatggcctgacccaaagctggcgggggcttcgcatagggagcctccttgagtttctgccttgtgtgcacctggataccaacctacacggagataattccctcttaggcctggaggcccctggcataatccagtcagtctatcctaggtgtaggggtgcaggctgactgccttgtctgtctctctggatgctggcttggctgatgctgctgcaatttaaaatgcaaaaaagccctaaagatgttttctgttttcggaagcctgtggaggaaatgagtcccaagcatcatgaattttcatttgcaggaagtgtcagtgcataatctagatatttgttatggggtttttggtattgcctgggtgcctatggaagattttttttcggtactgaaaaaaatgcatttgtggctgtggaaagatgttggagtaacactctgaaaatgattaagactattgaattattggtactgcctttttttttccccttggtgatggtggtagttatgttagagaaaagctgttgtatgtatctgttactcattagagatagatgggttttacaaatcagagatgcggagtaaatgtgggaatgacctcagttttgtcagaagaaatgcactaaaagaccctttgtgaagacatgatgtgaaggagtactaaccccactgggtgtgatgcagcggtgatcctgtgtgattgacactgagaccagagctcgtggacttttcttgactctccagctgactaaagcccagcttgtgaaaaatagcacatgagattcaaaatggaaacataggagtgaatgattcccctgttattgatgggagacaacctttgatttttttctcctacccactggatcctcatttaaaaaaaaaaatctttgtttttctccttctccccagaggcaaactatgcaagaggcaccagacttcctctttctggtgaaggaccaacttctcagccgaatagctccaagcaaactgtcctgtcttggcaagctgcaatcgatgctgctagacaggccaaggctgcccaaactatgagcacctctgcacccccacctgtaggatctctctcccaaagaaaacgtcagcaatacgccaagagcaaaaaacagggtaactcgtccaacagccgacctgcccgcgcccttttctgtttatcactcaataaccccatccgaagagcctgcattagtatagtggaatggaagtatcctttttttgggggaagtctttctcattttctcttttaccatctgttttttaaaaggatttgctttctgaagtgacacaaagctgtagcagtctggaatgcgagtaacagaagttgtatataaggggtttcattgtatataccttcctgtctcttcgggttgcagaggggtggctgtacgggtatatttagcccactgtctggatgtgtgtatagtagtagtagtagggggagggagtgacagcctgaaacttcacaggggcagataattaaaatgtgaaaccaacctttggttattggacattagatggttagttttaaattcagtgttgtctttgggcaatagcatgcattgaacctattgcaaacaaggtatacagattagaaaaaaagactgtataagactctgtttgaagggaatacatttttgacctttagtagaatcttctcattctgatgtttgaaatttgcttctgcaactacaattaatgctaaggttgcttctagtctgacatttggtgattctaattattcaggtagctgcagatatgagcacatgcttcctagggagagattacttttgattttttttctctgatcagtgctataacttcctggaatttccttttgacaagttccaaagaagcatttggaacgtgagcatgagggagccagtgaagggagaggctcgtgtgtgcctcttcctcctgggcccttatgagttatagaacagccttttcagtggaggaatttgcagttgctgcctttataaaaaattctgtctatgtccttggactggaggtacatttctgggtgtctcctttgtatttttaaaattgaactccaaatgccccagaatggctgtcatgtcccagatcttggaaaacgattgtgcttcagcctgcttaaccccttccctaaatctggaggccaacctccagttactgccactcttcagagaaggttgactgaggccttctttctgagcaaatggctttttaattaggcagatgattcattggtctgggtaaagtaaagcatttcctttccccagaagtgtgtttggaactgtcaggggccttagaacagttcctaactataggaaggggtgtgaatgtaggaattccctccaccaggcccagaaggatggaggggccacaccaaaaagggaggatgttggcagccagctagaaagtggagctgaaatccccttataatttgaggatctagctcggcagctatttgcatgccctctgtctttagctggctattttctgtgctaatggacaggagttaaaatgaggtaactgtctagaaagattttggagagagcagccaaatgctagggtaggatttgaggggttctcatgtgctttttcattttgcagcagatgtcccttctctagagtgagttatggtgtctctcacatagctggggttgtgtgtgtgcattttcttttgaagttctctagtctgagaacgaggagggagctcggtaagccagcatgtggcccagtggcattgctagattcatgacaatggctgtaccttgccaggaagacctcagactggcttgacacgactctgagtaagcagagacctctttgtggggtcactacttttgtgtggagtaggtgggaggcctgatgctgtttctctttgtgcacggtaatgtgtacatagcaatttttgcatgcagagtgaattcctggatcacgctgctgtctcccttttccagttgccagacacatgtgtacaggaattaggggacgtggctgccaattcagggagaagcctgtttacaaatgggacagtttgtaaaatagatagacccttaagcaatatatgatttttttttctctttttttaatgacagtttccttctaattcagggagcaggctatagaaatcctttccaccccgggcagctctgtcaaggccccatccgcagtgggagagcaagggtcaagggtcatttgtttttacagacaggcatgacagagtgtcctgccccctggaggagtgagggatgttctccttatcagaaggaattgttaggatcagacccatctatttctctattgctctgttctgcttcacttgtgaaaatcttatggcagtgagatggtatccacttgtacctggagaccaaaactggaccaacataaagaaaaaaaaatacaacttatatttagtcttcctgaacagtgttagtatttctcagatgtgctggtttatcatttaggtattgggaaattgaaaaggaagaatacctattacttaggtattgggaaattgaaaatgaagaatggaagaaagagggagggaagagactattgtgtttctatggagaacaacattggggcccttgactttagatttcagtggggacctacaaaaaggaaaaatggaaagggaattctgaagtcttaaggtgggctatctgaaagttggatccctgggtgaaaaagattttataatattagatgagttgagagaaccaatgtgaattaaagctgactggcttaaaaaaaataaacccatcaaaattagtaagggaataatgttattcattgcctttttttcgttgagttatgaaagctcttcgaagatgaaggttttatgaaactcaagatctctccagaggccgggcacagtggctcacgcctgtaattccagcactttgggaggctgaggtgagcagattgcgagtccagaagtgagcagattgcttgagtccaggagttcaagaccagcctgggcaacatggcaaaacccctgtctctactaaaaaaaaaaaaaaaaaaaaaaaaaaaaattagccggcgtggtggcacatgactgtagttccagctacctgggagactgaggtgggaggatggctggcttgagcctgggaggcggaggttgcagcaagttgagattgcgccagtgcactccagccttggtgacagtgagaccccatctcaaaaaaaaaaaaaaaaaatgatatctctagagaggtaaagagtatttgtttcctgtggcatttttggatttcccagaagtatgtcaggatgaatggagaatagtctgttcgtatgctccagttttaagtaccttgaagtgtttagttaaaccatggccttgcctcttgtgggtgagtgtataggcgaagcactgtggtaaaatcaagcccaggaattgcagatgaggctggtgctcacaaaaccttgtatttggaaaggctgaaaacccaaagaagaaaaacaatcattttggcagatgtcaaattttgtgttgccagttttgacaatgtctcttaataacaccagaatgtttaggtaagtatctcttgaaggctgatctcaaagtgattcttccagacagaccaccaagattgagaaatgttaaagcctactttgaacgtgtctggtgctgatttcttatggctttttaatttaatttgtttacaaattgagcacagtaacagcatattataaactgagctccagtccggctctaatctgaaacagttatagccatcgattcctctagcagagaaagcagaggcgggagctgaagcctggctcgctgctgatcacatctgaggtattggaatatgccatgagaaagttataggtagaatgagaaggtcctggtggcttggcctggcccagtccagacaggcgatttaggctgaccctgccaagaatagcccctgagaaaatggctctaacacatggaggcaaggatctgcggaagacatttatcccatgatgatttctctgtgtctaccacagccgggaacttagtaaggctcttgtcacttttaaacctgtaagaagcagaaacctagttcacacagtgccctaattggatgtacttttaggttttaatatgcagtgtgcagccgaagaatgagtgtaacatgatccttgcaacagaagaaaaggacacggagaggtcatttggtaggaggctccactgtgagatgaccaccgatgattacttctgccgaaaacctagcagtcacagcagtcagccgaaataggatttgtgtatgtcattttccttttaaaagtgctttgaaagtggtgtgatcgggagtgtgatgagggacatggtttatgtttccataacacatatataccttaacacattttttcagaccatttgacatatttatattattggctatttttgccaattgtgtggccttagctatttacatcccattccctgaagatgattctaattcaacaaatcataacttggtaagtgtccttagagttcctgctggtcctggtatatggttatcatttgcttctatacttaaactggcagctggccttctgggtggttgaagtttatagctatgcatgtcgtgtttcttggagctttgcaacagtggttttttgtttgtttgtttgttttaacctgtattctcaaatttatactgactgaaagtatttaaagtcatgaatcttttataaatagatatggaatttttatggaagagatttggagcagattttaaaataactgttatctccacataagtttttgctaccattcttttcctgataatattagcttttttcttttctttttttttttttgtttttaatctagtgttcttgggagtggtgggtactttggtcagttgttctggtaagtagagaattatcgtagactttgtacatgaactatttttagagaagtagaatataacaaaactaataaatctacatagagcataatttggagaataatacatgatattattgaatacatgatataatattaaagtttctactccacgtcctatgaaatgctccaagagaaaatgattgtatggttaaataaatcaggatgcttccatatactttgctgccttcttaaagatttatagtgcacattagcttagtaaaagctttgggaagttctgcagttaaaaaacaggtttccttttatttaactcagctagtccctaaaagtaatcagtcatgaattctttaaacattttttttttttttggcaaaagactttaacatcatggaaccagtggtccatggaacttcctttgggaaaggttgatatagttttttttttaaaaaaaaagcactaaagagtactagactgggactaggatcttgtcccactcacctgtcaactagctgtatttggggtcatttctcatacctttctgcattgctgtgcagccacctggcaattaggaggattgggtaagaagattgctagtatcgtttttacctctgacattctgcaatctttctttgatgattcagaagccatttcaggatttttctggtgctgcagcatccttcttgcaaggattggttctttgcaatcagaagccatgcagaatgggagatgaaggggagcccattctggataacaggaaactctattgtttttcttctcttctcttagctggttccgtttgtttttggcttctcatgttgaagctctattttagcagggctggatgttcctaactgagcgagcgttgtaaaggcaaacacactaggctctcccttgtgtgggagagctctgctggcttctgaagatagtgaaattatgctcttgtgaataagccttaacgatttatgtacaggatttcatgttacatttaaaatgttgtggcacatttcagatgtaatgtgatgtctatttgtatgtgggctttagtagtttgatatctagagaattttctaaaaattttgggaattgatgctgaaaatacaactataaatgggagtcggataaccacataaacactggtagtatatatttggacaatgccagagatcatttgtgtaactttggacattttatgtagcttttgatttctttgtagacatgtgacattagatgattgttttaaagaaaaagcagaagtggtggaaagcctcccatcaatggagatagatcatcgtagtctaggccacagatggtgttagccttgttaccaaatttaacgacgtggatggtgacccagattgttacttttcgtagctcaagagaacatgattaaacaaacttagaaaataaatacctttcagaaaggcagattaattcagatcagtggaataattaatgtagctgcatgtgtaagccaattaatattctgaatttttcccagggaaattcagggcactgatataggcactgtcagaccatttggatttctcagctaagaagtcaggaaataaaatacaggaaatggattaatctttcccttttgcaccccttctccagtgaatcttttcttgactattcttaagctttgaacttttttttttttttgtggggggggatttggcagtgtgttaatttggtgggcctttctaaaagccaacgtatattcctttgacctcttcatatagtattctgaaactcatggcattcaactttgtgtcttgctttcacttgggtggtcacatggccagatgaatttttactctgcttgactctttaaatacttcctttcccactgtgggaagggaagatctttgtggatttccttctgactctaagcaaggtcccatgccatgttggtcctcccatgagggagctggttttttgtttttttttttttaaatacatttgacccaatttgtactagagtgattgctctatttttgggattggtttagaggcagctgaacgaaacttatttttcatctgtagtaaatacctttcatttaatgtgaatggtaaaatcaaagggcagacgctgaaatgagttgcaaggctgcatgtatctggaagctgctggttttctttgcctgatagctccatgggaaagatgcagttgagcgatagagtgagatccagggccagctttatgtatgatgtttctgcctgttaccagttacctagtaaaattatgactttttttggggaagaaacgtggccatccccattgatccaatgtgtctttgttctagatagtatgtaactcagctagttttgggatttggagactaccttggggggcagaagttttcccagggatagtttttgttctttatttttttaaaaatataaacactctcaagtttctctgcagctttcgtttatggacttgcagggctagtggaggctggagtcatggaaacggtgcaactcagttcccacagtaatagccctcctagttcagtcaatagcagtatttcctcagttccacttactgaaagcaaataccattgattttattattattttttttttagcacagaggaggggaatgcctctgtatcaagtgtcagagtggggatgattacaatatcatacttcactgtgatgaaaaatgctttatttcatatcattcagtttcttataagcaaaccgacatggttgaacagttttgagtctgtgtaatctgttcctggtactcttcctcccggtgctacctcttacttctctggagtgtggaactgcttgaaattaaaaatgtccagaatggagatcttcatctgccaagtcagaccttctttgatccctactgatggctgcactcacctctaagccatctctgaaccagcactaagcgcccggaggcaaaggcccatggcccatgtctctctatccccttatctagcaaagtgcctgatgtaccaggtgctttttatttgtttatttgtttttttttttttttttttttgaggctctgttgcccaggctggagtgctgtggtgcaatttcggctcactgcaagctccgcctctggggttcatacctctctcctgcctcagcctcctgagtagctgggactacagacgagcgccaacatgcctggctaatatttttgtatttttagtagagatggggtttcaccgtgttagccaggatggtctcaatctcctgaccttgtgatctgcccgcctcggcctcccaaagtgctggaattacaggcttgagccaccgcgcctggcctatatgcacatctttatcctctggagcgtcttcaaaatacagttaatagtgaagcattctgaatccccagccatgcctgatgcagtggtaggggtatacagtagatgttcagtaaataagtattgctgatgtgcaccaagcgaatgactttcccaggagaagcgccaccatcattccttcctctgagccatgtttcagattttcttgggtggcaggtccctttgtggatttcttgcaggtccttagctgggaatgagtgggaaggtgtacgtgttattcctgaaaagcttagggtctgcggcccttcttgtgcacctctgcttaaaagagcccacagtgttggctttcatagcagagcagtctaggaaattttgtactctggttccagggctcagagtagcaagagtgctgggacctgtctgagaagcagtgctgggctgtggatgcttgcctgtggcaccagatgccttacagtggccaggaatgctgcgggacagtctactttgattgctttctttcctccatggctgagatctgagtgtagtgttaactgggcttaaaaatcaagtccgttgtatctgcatggtcacgtagttcggcatctcatggcttttgcacctagaggtgtgaaccataatacctgaaacacaatttcataacctggctccttgggcttagcctatatggtggaggttaggtctgtatatcatcaagactgtgtctttgcatggttgtcattctgttggaattgaactttcttatttctgtaggcctaggttctgtctattcttctcagacagctcatatgctgcttcttcccttcagccttctctgatacttgtccactccccgcctgcctacatctgagtacttgctttccctctggacacccctgtgcccagtccaactctcctgtacagacaccagcccctttcccctggtttataactgttgtgggaagtggcgtggagtgtgatggtctgctcatgggctgtggggtctgacagcctgactctttggctgattagctgagtgactttggatggaactagaatatgagttcctagaggctgagactgcagtctgatttgggtgtatagccttgtgaacttaatcctgtgcctggcacacaggaagcacatcaggaaatgcacgtcaaatgagtgaataaataaatgaatgaccatacaaggactccatggtatattcttgtagatcattagttaattatcaacaattggctaatgattaatgtttgcctgagaggctgactttttgtccattagtaatgacatcccaggaaacacctggcagagttcgtctttaatttcaggagtatatctttctttcttggcaaatttaactattaaagagagaagaaagacaagtacttgatactttttgaatctgtaagttataaacctgtcttctgtattcaatgttgtatattagccacattgcagatgattctatttggatggatgtgtgactgtcacctttcacataaaaattgattgagccagtcatagtggtatgtgcctgtagtcccagctatgtgggaggctgaggcaggagtcttggttgagcccaggagtttgagactgtaggggactatgagtgagccactgcactctagcctgggtgacagagcaagactctatctcaaaaaaaaaaaaaaaaaaaaacaaaaaaatgtggtagaaggggagagagcctcaaaatgaccagagtagatggactcgtgtagtaaaactttacccaaagttggtttcctaatgatataatgtgaaacagtctatgtgctatacaaataattatatctcttttgttaagccttacgtcattttgacaaaggctttacttgattgagtattgacggcttttccaaaataaaatccagctcttaattgagatttgtggctgggcatagtagctcatgcttgtaatcccagcactttgggacacttagcagggaggattgctggaggccaggagttcaaaaccagaatgggcaacatagtgagattccatgtctccccccgccaaaaaaaaaaaaaaaattagctgggtgtggtggcgtgcacctgtggtcccagctactcaggaggctgaggtggggggattgcttgtgcctgggaggtcaagactatagtgagctgtgattatgttactgtactctagcctgggtgacagaatgagaccctgtctcaaaaataaaggaaaaaaagaagaatttaggttttttactattaaaattccataagaggaattccagtgggggtccttgctcatttggtttgtttttttacaatgtgaatatcattattttatagtcataccttatacaacgaacctccccatctagacccttcactagtgagactaccttagggtgaggatatttgggtatattagagtattagccagaactctttgggttacagattgtgggaatacaactcactcaaattggcttagctgaaaaaaaagtgcgtatgtatgtacaatttataaactcagttaaccaaagagtccactgggtagaaatggcatcagacacagctggaaagggggggctgaaaagatgtcaccagcattctatccctgccctgcaccctcgggtttctgagccagagtctgactgacctctagtaggtcagcctcacgttgcctatgtgtacatcttcctcagctcattttgaggagggcatgtggggacgtgcatttctttctttttttcaaattttattttattttaagttccgggatacatgtgcaggatgtgcaggtttgttacataggtaaatgcatgccacggtggtttgccgcacctatcaacccatcacctaggtattaagccctgcatgcattagctatttatcctgatgctcttcctcccacatttctttttttttgtttttagcatttattttaggtttgggggtacatgtgaaggtttgttacataggtaaacacaagtcgcacaggtttgttgtacatattatttcatcacccaggtattaagcctagtacccaatagttatcttttctgttcctctctcttcccccaccaccccgcaactcaagtagacccagtgtctgttgtttccctctgtgttcgtaagttcttatcatttagctcccgcttataagtgagagcaaggcatttctttcttaatctcagcttaagttcggcattttaacaatgattgcatcagaaacagagacctctgtagcagattggtgggtagttttctttttttttaaccttcctcattggtgtttgtttactttttaactgtctgacaaatgtgaaaagtacccaatacagggtgacagcatgcccagcagtagagacacttgggtgttaaataccagtggcggtggggacacgccccaacagaccccaacagcttctcaccaaagaaagttcctaaaggaatggaagaggttctagaattctggaggtggggtgtacagggagggaccatgtgcactgttactgttgagtggacagatgtgcagaagggaggggtgtcggcgggtgtccctgccccagcaagggtagagggctggttagcagttgatccaggagtagatgttagcatccccaccatgcagctacaggatgtggtcctcaagtcctgtctgctcatgtgatggaaataaggagagtggtggaggcgggggccttccttttttaattcaggtgagattggtattctcccagctggggttcctgtgggctgtaagggtgtttggctgggcaggcaaagccggaaatgggtggtatggaggaagaaacagaatagctgaagatgggatgaaggaggaactgcctgaactgatcagtgagctccacagccccctctgtgtgtgtgtgtgtgtgtttgagagagtaagagagagctcatgctcatgagtgtgtgagttaggggaaaggtggaggtgggcattgttgacacaggccttgcaggacgaagccttcctttggtggctttaattaagcagggccccagacactgcctgggctggagaaaatgactttcttctccagaacttcaaagcaattatttttgctaattttttccttcctccctgttaggtgagtggtagttttagaaatcacaggacatctgttgaaattattgaatgagtgaacgcgaggtgaggctggagggaatcaggggctgacccgagggagggcggggaggcaggtgcagactgctcagtgagtgtggtgggatcccggtcttggctggccctgtaggagcccagccagggaaggcaggaagaggtggcctaggttagctttgcctggggattcaaaggggccaggcgagaggctcatgctctttctccttccctttccctgccatgctcatcttctgagggctgacgctgaatccttttcctgtgtccgtcagggattcctgcataacatagactcacagatacttttttacagctataagaggacgtatttataagaaaggaaattgaggcagctttattcaacaaatattgattgagacctcctgtgcagagcacagcagccctgtgtttctgccttccagcccgctgctgtggctccccatgccttgttgtgaaggaaaacctacagtgtggggttggaaaacagccagatttgttttcatattttgcattcttactataaatcatcactcaaaattgacacaagtaatacatgaatacattgtttcaaataattaaaacaatacagataaagtaacaaacccctttacctacccaactccttctaattacaatgatcagttccgtgtgtcccttccgaattgtttttcacagcgtgtgtgtacgtatgtatatatcacctgtgcattttgaaacataaatacagtttgagtattttaaatttcgtgcaagtgggaacatgcattctatggcttcctttttcccactcaatagaccttacagacctttccatatctgtatgcagaaatctaacaacttcatagttggtgtaaaatattccatgtatgaatgtaccacagtttatttgttttctttgtgatgaacatttagggtaattccaaaagttttactgtttcaaatcatgctgcattgaatatccttttgtatgcttctttgtgcatgcaagaaaacgtttgtctgggatgacaactcagaagtaaactctccgggttggagggtatgtgcgtttttaatatccatgtttattgccacatcattcttcactaagcctgtactcttttacctcacaccacatctcactgcctcagcagtcatttcactctgcagagtgacctcatgtgttctgtatcttaggctgtacaaaaggaagtcttgggggttgggtctggcctctctctgggatgttagtagcatctggagcatctggttagagtagaaagtccacaaacctgagccctagattttaggaatctattttgcaccagtgaccagataaaaggcaccaaaacttattcttgtctcccttgctttcagtcccaggtgcttagatactattgtttcttttgagtgaaatattcattccaggtagctaataggtaaataagttcctaatacaaaaactgagtcttattttggaacgtttgcttgctacggactggtttcatgacaaatactgcctttatgtccctgttagttggggaagaagaatatccaatccggtatgtctctgatgtcccgtgttcttattatctgttttattttcacacacagtaaaatctcgctattattatggtgtttagggtttgtgcccttcttatttccgaaatctctgaggtggtttagaaaatagaatttgatgaaagtgggacaatggggaatggaagcaaagtctacttgccagggtgctcgaggggaactgattgctgacacctggacatggaattggcctcaaggtttcccagcagcggcggcgaaaaagagtacatcctgacacacagggtttttatcctttcgacaaagggaagcagccacgctcattcagagcagcactttctaggaagcacatccaaggaggaatctccagcgcaggtccttgtgtaaggtacattgttggagcacaatgagccatgtcttcgccgtgcttttgtcggggtcagaaatgccgcgcaagcagatggtccctgcattcatgtttttcaggggtcagggtacgacattaaactgtggtataatgaaaatggaagtacttctcatttctataaaaacgctgctttttgattatataaattagtataggatgaaagctgggaagatgaaaaaagagtagtttaacatagccattatttaatcattcataaagtactttttaaagcatttattacgggtaaaatatagtcccattagacacattccctctttgtgctaacttggtttaactcaaaatacaaagggatacaggaatttatgcaaagaacatcctcccctgcccccgtaaaaccatatttgaatatatgtggttttattattttactctaatgtaatttaaataaatgaccaatatttttaaaaataagaaatccttgaatattcttcagtaaatagataacaacagggtataatgaaacactgtttatatttaaatgactgctttgaaacggtgtgaaagcagcttaaatgggtaaaatgctgcccttttatgtcagtaattagccccttggtcttttttcacgataatgcaaaattgtacttctctgtaggcttacacaaattctgaattattgaaatataaattaatggtgaatctttctaaagctcttttcagaatttttatctggtgggagtgaaattaaaacatccaaaattctaaattagaatgtggcaaagtagagacagccagctagaatttggtaaaagacaggtgtttaataaatcttttcctagacatccatgggttggtactagtgtggtggggtagagaaagctttggcgtgttttaggttggccaaatgaatcagttaattgatgttattaaagccaggtgggacaatagtaggttagaccgcctggttttgattgaccctgaatgaggaatcacagacatgatgaggttgggattggagaggacatcagaaacctccatatgggtctgttcctttttcagacccgccagcatgacctgccctgggttacacagtgagagacgaaccgcatggggatgtagggcagagcatctgtctcccaatctgttttcttcctacccacctcagttacaactatgactccaggttgaagttgggcatctcctatctgaccaagggacagggtctaagaacagcaggggcagtgatgacaaaagattgtctctttaaagcaagctgggcattgagtcaacttttcattatctcttcaattattttctttgtgtagtattaggtcggtgcaaacctaatgacggtttttgccataatacatcttccgaaagatagtttccatcacctctccctcccctgcttaatttcataaaatactttattgctttcttcatacataccaacctgtagaaatcatttgaccatagattgccacatttattttatggaaatagccagggcacaggccagcggatgtagtagggcaggagagaatcagcagagctggctaacaaatgcagtgggtctttcctcagtttcttgtttttgtgtggttagcttgccctgtctttctgactataactggaggcacagtggttattgcctttgttactagctgacattggctgacattgctgagctaggtgggctttctatatagggtcctgtgctgaataacagtgtttcagttcatcagccaagatcaaagtcggtggtcccataagattataatggagctaaaaaattcttgttgcctagtgacatcgtagtcattgtgcctttgtaacattgtagcacaattactttattttaaaaataaatttggtagccaggcgtgcctcacacctgtaatcctagcactttgggaggacgaggtgggcagattgcttgagttcaggagttcgagaccagctggtgaaacctcgtctctaccaaaaatacaaaaaaattagctgggcgtggtggcacacgcctgtgattgcagctactcaggaggctgaggtgggagaatcacttgagcctgggtgatggagattgcagtaagccgagattgtgccactttattccatcctaggtgactgagaccccgtctgaaaaaataaaaataagtaaattcaatgtagtctgagtgtacggtatttataaagtgtatggtagtgtaggctttcacattcactcatcactactgactcactcagagcaacttccagtcctgcaagctccattcatggtgagtgccctctacaggtgtactgtattttggcttttatacagtatttttactgtaccttttgtatatttagatacaactggtgttataattgcctatagtattcagcacagtcacatgctgtacaggtttgtggcctagcagcaacaggcgatcccatataacctaggtatgtagtaggtggtaccatctaggtctgtgtaagtacactccgtgttcacacagtgatgaaattgcctaacaatgcacttttcaggaccctgttgtttatacctgttgttaagctatgcatgactgtaatctcctctaattcccatttaatctttaccataaacccacaagggagatactgttaaaaaaatcctcattttacaggtgaggaaacaaggctagaaatggttatattgcttgcacgaggccgtgctcctggtaattggcagggccaggattcacacccggacttctgactcaagcgcccacgctcaagtactaggccatgaaagggagtccaggctcacaggctgatgatgcctaaacaccaagcggaggagggtatgaccaaagggcagagccagagaggagaccatgggggagctgacggcagaaccttttgggggcgtggggggtgggggtctctctggctaggcttcacattcatgcttttgattagtgattggaaccaaggtctggggactggcatagaaactttccaggttaggattcagtcccagctttgcctttcactggctctgtgactgggtcaagccctttctgcatctgctctttctctgtggaagaggaaataaaatggctaaaggtgttatcacaggccctggctcctagaaagcactgtgctgtgagccagaggtttaagatgggcttcagcctcacagcagtcctgtgaggtaggtgtcgttagccttagctgtagatgaagaaactgaggcttgggaagaccagccggcttgctctggggcacctggtgaagagctggctggatggaggattggatagtgatgggtccctcctgccatactagaagagcttcctggacagtttgcttggattggagtttaatttctaaagccatttttttaggtgttcttaccagactgagctagtgcatctgtcccaccgaatagcctaagactttagtggtcatagagggttttgcagcggatctggtgaagaaatgaactgaaaatgagcctgctggccataggagggcctagacctggaccataccccatcatcatttagacaataaagggtggttaattcccttggaacaccaaggacagagagggggctagtttaatggtcaggatctgattctgctgcagctagaagactgaagcctgcctctacatggtggtccggggtaaaaagttcaaagctcagcacactacccacaaggcttggtggtttctttacgtgtgactttctcagccgacttgaaatccaccaggtgtctcttgttctctgcttggcccaggtgggagcccctgattgtctcttgacttaaatgttgctcagaagaggaaataaagcaggagctaaggagcacaacgatgtcagggggattctggcccgatggtcgtgcagttcctagatttggagtcgtgaaaacaatcactaacacctgcgtggtcagggacggcctatacggcacttcatcatagggtctgatttttatcctcacagcagccttgtgaacattgctgatatttgacacaccaggcagccaaggtgtggggcagttgaatgacttgcccaagagcaaacagcaagtaagcagcagaattaggatgtggacctctcctgccctttctgccacactgtgttcctcgtgtcatggagtcctccctgcaggtcactcgggtaagagaccaaggctcacagatgggagctggcttgccagagctagggctcctcaggacccaggtgatgggcttgcttctctgacatgtggtccctgacctctgttttctcacctgtaagatggggatcatagcattattaatagtcatgttgttgagaggattaaaggcgattttgcaagggaaccctctgtgaacaacagatgctggcccattgatttccttgtgcatctagtcccactttctcaggcatttaggctctgccctgctctggctctctctctcttcagccttccaccgtatcaggagagtggagactctggaggaagacagatcttggtttggtttctaggtttgatgctgactgactgggtttgggaatgaacaaatgatctcacctcccttggtctggcttcctcatctgtaaaacagagataataattctcatctcacttttcatgtgggatctttgtgaggagtcaatacaaataatgtgcgagggagctctcatttaccagaaggcattagttaactggtcaagaatagttcaagagagtcttacctcccagtgaagtttaaggtttggcagtatctgagcactgggggaatcttttcctataccccccttgaagtgccatagggttttgagaatcagtcacacggcacacctgttaaatccctgtgttcttccatgattgctgcctttctttgccttatgattttttcccttattgtggcctagtccacggaggttggaaagaggagtgtgcccttcccttcccttccctttcctcagcaaggggctagtttctactcatagctcagggctcacccacagcatagcgctgtgtggaagcctggtgggggcactgggtgagtggtgctgcagcagaaaggcctcctgctgagacgctgaggtcagcattttcagcggcagggagccctgtgactgaaagcagaaagaccaagtacagtgtgaggactcgggttggtgtttgtggccacattgatggcttcatggaagtatgttcccctctgtgcaatgaactagtagggcctgtgtcttggggcctgcaccttttgattgcaggcaccaggcccagcattttttctgtgttgcctatctggacgacaagccatacggtagttactagcgtccccattttgcaggtgaggcagatgaagctaggaggcgttaacttaaatgactctttgctgagggaataaacccataagatgacaaatgaggtctgtggtcactttcttcactgttgcagtgctgtgcccagcactgagtgtgagggatgtcatggagagaatgctgaatttggagtccggtggcctggctttgagtccctgctctgtaactttacttcgttgtgaccctcactttcttcattggtcataaagcaggaggtaaaaatttaaatgagatctgtgtgaaagcgttttataatctacgaagctatatacacatgggcggcatcatccttatggctgtctgttgagagagggcctcgaggagaggacttggcttcatcttgccttctaatccctcactgcaaggccctgaatcctaatccctcactgcaaggccctgaatcctaattccactccatctctccatgatgccagtgccacatctgggacctacgcagaagagtcatacctgccagcacagctatggtgattgtgcttgggaagaagttgaagttgcagaaggaaggtggtagagagggactgaaagagccaaccaggccagagctcgacaggaccctccctccttccctacccttcagacaggagctgcatcaccattttcttttccttttctttctttctttttttttttttttagacagagtctcactctgtcacccaggctggagtgcagtggcagtatcttggctcactgcaacctctgcctcccaggttcaagcgattcttctgcctcagcctcctgagtagctggggctacaggcgtgcgccaccacacccagctaatttttgtatttttagtagagacggggtttcaccatattggccaggctggtctcaaactcctgaccttgtgatccacccatctcagcctcccaaagtgctgggattacaggcatgagccaccgtgcccggccatgcatcacgattttcaaaggccagcttcctgactgttccttgaactccttgagataggtatttactgtgcttgtgacatgcaaactgcaaataattcttgcctcataatggataggcctgtaacccagccagccctctaggcaagcaaatgttatttcctagttttaagtgtgagcttaatatgtgaattaatttcacatcttcatcctcttcctaaatctgtctttgttttgtctgatgaataactgaagtaatggatttggtcacaccactagctgggtagccacctgaggctggagttctgatatgtgggtcttgcctgctttctctgcactgtggctttgcacgtcgggtgctgaagctggggagctggaatcagctggtgtgttctctgtagaactgagaggactagcaccctggggtggaagcagccctgccttctgaaccacagacttgcttgtgtttgatcttatgctgttttcttactatttctgataagaatgtgaactccttgtgagcagggacccagtgtcccatttctcttaaatcctctacagctgctggcatgggatgtttggtaaataatagaccatttaatgaagcatcactctgtctgtaccaggcaccttgaagttgctttgattgctttgcctgttttcctaataggtgtccggtggtctctctttccaatgcaggaacagagtgctggaggtagagactgtgattgcttaatgaagatatcagaacttgcacaacccacacatagggctcccatcaaagcagtagttctagggctgcaacctcttcccaaagatgttgcaacacttgtcttcagagccagtttctgcttttcattttcctttgcttctggctaaaaatgggatcctgttgtcactgaccttactccccgtcttttctttaagaaactcttgagtatttgtaagaaaatcaaatctatcttcaaataaccaagttttcttatctttgagaatcttgagtgcaatgtgtcatgggctctgaaggtcttacgttgaggaatggcaatattatcagaattacgtgtccagcttcccaagcttactactttgaaggaacacatatttacacaattctgatgtgtttattaaacaaacagctttaccacttcgcagtcacgcttctctaagtctgcagtctcgtctggcctgactttctccttgtgccaagaattccttcaccttttctctttagcctttggccccaggaaaatgggaaagtaagatattttactcctggccaatgcctgatttttagaagccttcctcactccctggcaaggcacattttcctgttacctcagagtaaagagactcggttctggggttctgcatagtgatgctacatgcctgacccttgctagggtttgagggtccttgggaactgatgcaatcgtagaagtcacagctgtcattcaggttatttacagaagtagacagaattgcttcacttgccagcagggcgtcttgagcttgactcagaaggatatgtaagtttctgctttttttttcttgcctgtttcaaaaacgcatttttgataccaggaaagttagacaatttaatcttatctgtagcagagggagcttcatccttgctgtgtgaagctgtgcgagacgacaaagactgttgtagaaagaggcctcttgcttataattgaagcatctttgacctgagtcagtgttctgcagccaggatcagataatcagcactggtcactggcacctggcattgggacctggaggcaaagaataacagaattaattggtttccagtaagtagcagggatcatggcatgttcatactttttaaaagaagccttattgagattgagatataattcacacaccctatacttaactaatttaaatcatacaattcagtgttttttactatattcactgttaagcaaccatcatcaaaatcaactttagaacattttcatcacccaaagaaaccccatacctattagctgtcaccccattttccattctattccccctccctagccccagccctaggcaattgctaatctgctttctgtctgtggatttacctattctgaatatttcatataaacgggatcatacaatatgtgtcctttttgcctggcttagcataatgttttcaaggttgattcatactatcgtgtgtatcactacttcattcctttttatggtagaataatcgtccactaaagggacataccacatttatttatctcttcatcaactgatgaacatttgagtgttttcccctttttggctattatgaataatgttgctgtgaacattcatgtgcaagtattttgtgaacttaagttttcaattctcttggctatattcctgggagtggaattgctaggtcatatggtaactttcccattttgagggactgccaagctgcttgccaaagcagctgcgccattttacattaccaccagcaacatgtggaggttccaatttctgtacgtctttgctaacacttgttattgtctatctttttaattatagccatcatagtgcatatgaagtggtatctcattgtagttttgatttgcatttctctgatgactaataatagtgagcatcttttcatgtgcttattagccgtttgtatcaaatcctttgctcatttttaaattgaatttttaaaattattggtttgtggcagggcatggtggctcatgcctgtaatcccagcactttgggaggccaaggcgggtcggtcacctgaggccaggagttcgagaccagcctggccagcatggtgaaaccctgtctctactaaaaatacaaaaaatagtcagacatggtcacaggcatctgtagtcccagctacttgggaggttcaagccggagaatcgcttgaacccaggaggtggaggttgcagtgagcctagatcatgccactgcactccagcctgggcaacagagtgagactcaatctcaaaaaaaaaaaaattattggtttataagacttcttcatatattctgtataccagttcctttttggatttatgatttgcaaactcctttctttctttctttctttctttctttctttctttctttctttcttttcttttcttttcttttctttttctttcttttctttctttctcctttcctttcctcctgtcctttcctctctccctttctctttcttttccttttctttctttcttctttttttctttctttccttttttcctctctctctttccctatttctttctcttttcttcaggcttttgccctgctggccatactggagtacagtggtatcatcatagctcactgcaactttgaactcctgggctcaagcaatcctcctgcctcagcttcctgagtagctaggattacaggtgtgtgccacccaacctgtgctaatttttaaaaatttttgtagagatgggggtcctgctacgttgcccaaactggtcttgaaatcctggcctcaagcgattccctgcctcagcttcctaaagcattggtgttccaggcatgagctactcactgctggcctcttcaatttcttgatggtatccttcaagcacaaaagtttttacttttgatgacgcgtaatatacattgttagaaggccatagctggattgagtcttcaaggttgcctgttccaactcccttgtcggagtaacgggaggcactgtgatcagagaggaggggcctttctgagggtcacagacccacaaaaccaggactggagtataagtctctggactttcaccttgggacattctcagtttccaccccactgtttctgagggtcgaaaggtttgggtgtatatgtagggaaagataattggtaggctctgaagcacacagttcatttgtttttcaataaggaagagtcatgttagaaattttgtcctttcttccagaaggtacactatatagcctggagccacactgtccaaaatggtagtcactggccacatgtcattataagaacttaaactaattaaaattaaatgaaatttaagattctcagtcataaagctgtattttggctaagcattgtgacttatgcccataatcccagtattttgagaggctgaggcaggattgcttgaggccatgagttggagaacagcctggaaaacatagtgagaccccatctctaccaaaaaaaaaaaaaaaagaaattagccaggcatggtggtgtgtgcttgtagtcctagctagctacccaggaggctgaggtaggaggattgcttcagcccaggagttcaaagttgcagtgatttgtgatcatgccactgcactctagcctgagtgacagagcgagaagctgggggaaaaaaaaccacatttccattgttccttatttatatatggccaccgtattagacgacatatgggttgtttccatgattgcagccagtcctgttgggcagcactggctatacccactggcattctgtccactcctgacccagtggtgccctagacacccagctgtgatctgtcttctgtgggtccctcatctacctgctgctcaggcttcttctttatgtagttgcctctgggcttcctagcaagccccctacccagactagatggtctgtgggccctgcaggcagagacacttcttctgcatagtttttggatgtggttgccagtataaaggctagtgcctttcctcacctcagccaataggtgtgacttgcagaaatagagctgaaagatgcttgcaagaagtgtgttctttcttggagaggttagctcctaaaagtgaatgctgaatgagtggatgaattgatctactctttggactaggggaagatgttgaagaattttttatcgaaaattttattgatatgtaataattgtacatatgtatggggtacatgtgctattttgatacatgcctgtaaggtgtaatgatcatagtgggtaattagggtatccgccacctcaaacactatttctttgtgttgggaacatttcaaatcttctattttgaaatatacaataaattattaactattagtcaccctactgtgctatcaaacactagagcttatttcttccatctaactgtgtgtttgacccattaaccaacctctcttcatccccctccagcccctcttctcagcctctgataactattattctactccctgtctccatgagatcagcttttttagttcccacataagagtgagaacatgcgatatttttctttctgtgcctggcttatttcacttaccgtgatggaagttggagtactctcgagtttagttcttttggctgcattggttggtggtgttttgggtgggtacttcattttagaggcagtcagttccaagaatttgcaagatgctgagtgaagtggggcaagaggcaggagttggaacactgggtgttctgagacagtgacatgagggagatgggtgtagtcctgctgggtgccctgtgtagaggtttcctttatttcaggttcctgtaaccctgagggccatctgagccatcaatccaaggtcaacaggctatggaaaaaatctcaaaactgctctatgtaaaaggatgttttacccacatcttagtgatgggagatactgtagtttggaccaagctaggatattatagaccagaaatgagtctggggactatctcagacatgagaaaggattgaccaagaatcatagcaaattcacagtggcacaactgagactggcatccagggcctctggcgcttcgccataggcacattccaagtgccatggtgtatgtcttcatttacacaaggacaggtacttcatacacacaaacaagcaaagcaacttcttggagacattgcccaggcttagattttaatttatttaacccacgttaggcactcagtcctgccttcaggcccccctttgccactctcataattagaaggtattaagaaacctttcaattacggcaagatcaccagggttctcatttctttttcttatctccagcctatctctagaatctattttttgcagggaggactgtccttgactttaaagaaagcattcagaaacaaagagacttgttatttttgaggtcagcctcctccaccagactctgagagccttgagggcaaggacagtgttgtctcttatcactactcaaggactggtgcagagtgttcatttggtgaatatctgtgaaattctcatttttaggagaactcccttttgctgggcttctcaggtatgaggtcccttttccatatggtcctgaaactttatcaattccagtttagaagtagcgacctgaggaaatggaataattcttctgtccatggtgaggggaggatggggggaaggtgctcattttgcctttgaacttgataagagcagagaacagtcaggtttgtgctgagaatgtaagggttactttttcctgaattgggcagtgggtggatggagcccaacaggacatcctgggaaggattcccagagcagggagagggcaagcacagaattgtggaaggaattccgtgccataaacacagaatatcttatttaacagtggaacttttttgctgtcttctttagaggtggaaaacagttctttccaaagacaagcttaatgactgctgtgccaacacacaaaactacaagatacatttaagcatcagtttagcaccagaaatgcagtttacagaagatttgcatgaaaatcttaaaaacaggttgaaaatgtcctaggctcagctagtgcacttttaagttagtaggaacagggctctagggatgagatgatggagcagggatgtgacataggtcaggggtacatgtgtacctggcctttgaagcctcttttggggttcattttaattaatttcttgttcagcttttaccatgggcctaagtttctctggttggagcagagtaagttttcaggctgaatttcttggatcattgcctttgttttctttttcacatagcctgtggatgtctggccttttcagccaaggaaagaaaatggaaatggttttaaacactcactcacttgagccatgaatttcaaccatatattaattttgcttatttttggattttcaaatcttctgagaagcaatgaaatgacacaggggcaggccactagggtgctttggaggttctgcgtggcctggagcagtggggagaggctcgggagagtggaactgtgccctcccactcgtgctacccacacagcagcctcctccctcactctctccttcatgtatgtgtgtttgaggttctgcttagcactttatttggggaaaataagttttctgaaaacttattttgtaggcaatagaggagagattggtgtatgtcttatccttactcgagttggcaaggactctgggccgaatatttagggcttggctcttgctccctctacctaggtggattatgcagtgagatctcacttgcctttaactcatagttattgcttagctcttaggagcagtagaagtaaaaatcctggtatcgtaaatgagcacaatccctgtaataagtgatttctgtgtattattggtagcttgaaaaatattaagtgttacctccattttttaaatatgaaataaagggctagatcaggacatgaactcattcctgttgtcttccagagctattttactaaggaggagatgacccagtggtgaagagtaggtagcagcatgtcaaacctggtagctttgcagtaggggaggtgggcagtacagtgggaataagctagaactaataattcagtgatcatatggggccttgcaggtttttgttattttctgcttgggtgtaggttttgctttgcaaagtctgaaggtgacctatataattcccatatatttggagctctcaggatgtgccaaggatcagcccaattctctgaacgttaactgagggagtcaggagtccttcctgacctcaagaagctcacagttcagttggggatagatggccttgagcttgtgttttagagctctggtcccaggtagtgagctcaaacccagcacagactagattaagccaaagaggaatttattggctcacattgctggccagtccagggataaactggagtcagctcaggcgctcaaatgatgtcaccaggatctggtttctctctctccagcctggctccacttcctgtatgttgattccattctcaagaattctcagacacgacctccccttgtaattgcaggatggctgccaacagtttctaggcctacgcctttccaccttccagcaaaagagagtgtgagagtctttgtcccagtccttccagatggagtcttgtttcttcccattgtctcagattgggtcacgcgcacatccggaaccagttgcaaggccagggacgtgtgcagcactgctgacgtggggccaggtcatgtgcgtcacccctcgacctggggaggagccaactctaccctaagttcctgggctaagaatggaaagagagtcaagtattggttattggggaaaggtaatgatgtaggcttgaactctggcctgacccattgtcaggacagcctgaacttggggctgtattcccacctgacatagccttaagtcagaatttattccagtatgagtacagcatcttgttaccatgtggttttagctgcactgtggatttagacaccaaatcttgtcttccctgagaacattgtccttcctagaggtggggtggaaaacttatttcaggtaagcattcggaccttgaccctaaccttaatggtgattactgttcgaggtttttcaaacacatagtgaataaggacagctggtgcaatggcacgccctccaattggctacgttacacagataaacattcttaatctttctgaggttttgtatagaagagtggagaattgtaccaacttttctccccccggttgtacatcttcactttgtcaccaagcctggattcctcatctgtaaaatagtatcccctcagagttgctatgagaaataaatgaagtgatttgagtaaggcatggcacctggaacatagtacatcgtgcataagaagcagctattgttattatctcctaatttgtcaaatgagcagggcgtattgccagataagctctttaaagttttaatgttcacattctataaatctaggaaaatctttcctccactgcccacccacacttggattttgagaactgcatcttcattgagggtaacgtgttagaaagctctcaaacattatagccctcacagaatgtatagtacttcataattcaccaagtactttcgtgtccattctctcattcaatcctagaacaatctatgatgaaacaaagcaggtatcacaattcctgttttatagatcagaaaacttagggcttagagagatcaaatgacttacccaagggcatagtggctggaaggttgcagggcaaggcctattgccagaatcttctcagatatcccatgtctgttggagcattcttctactccagtgtggatttgcctttctgatggctttgactggagaactgtattgggtagttcatcaaaataagaagccttgagttcatatagtgaaaaataagatcaccttttccctttgttcattggcttgatttattaggattgtattctcaaacctttcctgctattaaaggaaatgaccttagtttgtgttgcatgaaatagcattaagtcaagtttacaacatttcaaagttatggtcagtagcattccaattagaacctaaaaagcttacctagctgaggtttaagtcgttgatcttggaaaaggtaaagacttctcagggaggttgggctgctgtgtatgacagctagaccctcagttcttggtctgttaacatgtggcccatttcttcctatccatgcccctccataaagctttgtgcgctggtagtatttacagtactggatgataattatggcattaattatttgagataaatggagtgtgcccagtagccaatagactattgttagagtattattagtatttttataggtcttttggatagcattctatttcaagacatttgaaaatgtagaccagattagtcaaaagcattgtacatgatctgtccatgagtgtaggctctcattagaacttctggaatcattctgaaatatacccagctagataatactaagtcataccaattaaaaggaaagacttgagtttgagttatagaatgttggagagaaatctagtttattacttttaatattgaagtcaaattttgatttttcttttatggttaatattacctgggtcctaagaaagattgcaaacatgttttcttaccttttttcttgtagaagctttatatgatgttagcttttgcatttaggtctgtggtccatttcaaattaatttcttttctatggtatgaggttggggttaagaggttaattccagccacctcccttgtgggtatccagttgctccagcaacatatgttgaaaatgctttcctgtcctcatttaattgctttggtacctttattgaaaatcaatggatcacataaatttggttctgtttctagggtctctgttctgttccattgacacatttgtctttatgctatctctgtactgttattattactgatgctttgttttaagtctaaacattggattatataagttcttccatttttgttctccacccctcactacaagattgtattggctattctaggtcctttgcatttctatctaaattttagaattaacttgtcaatttctataaaacagccttctggggttttgattgagatgacgtcgaatctataggtcaatttggggagaaggatagcttaagaacattgagtcttctaatcactgagtgtgatgtatctctttagatcttctctaatttttctcagcaatgttattagtatagaggtcttacatgtattttatttatccctaatttttatattatttttgattttattgcacatagaattttaaaaagaatcttctagttgtttattactagtatatggaaacatgcttgatttttgtatatgttgccttgtacatgccgccttgtcacatttacttattacttccagtagtttttgaagattctttagaattttctatgaacacaattattttgtgaataaagatagttttgtttcttccattctaatacttatttatgtatatatgtatgtatgtatttttcttgccttgtaacattggctaagaccttccatatggtatagaatagaaatggtaagagtgtagacattcttgccttcttcttgaactcagaaagtgtttattctttcatcactgagtacagtgttagttggaggttctgcataggtgtcctttattggttgaggaagtttccttctgtttctattttcctgagagtttttattatgaaaggatgttgaattttgtcaaatgtcttttctacatgtattgagataatcatatggtttttctcctttattttattgtggtaaattccattgaattttgcatgttaaaccaattttgcattcccaggacgcacctcacttggtcctgatatattatcctttttatatattgagggatttgattttctagtattttagcataggctttttacatgtatgttcttgagggatattgggtctgtacattttctttgtaatgtccctgtctggctttggtgtctgggttgtgctggactcataatgtgagaaatagtgtggtaccagttgctctgtcatgaccagcagcagaagtctagttttctttaagtgtgtagagtgatgactgttaggtaaagagttagaattattttaatgatcagccaagagtctctgctaagtaacatgaggtatctgtgaaatggcatacataactgttgtgtatgaagcagtgcatcagagaggctgggaaatactttaagtgggttgagcaactcataccattccttatgctaaaattgtacttatattttattagcaaaatttcttttatcactgagagaatgaattatctatctgattgccactcataatttatggagttatcagttaataaggttttattgtatgttaatatgagactcatttttttcctttctctcctctttgggttgtatttcttccaagtaagagcttaaattcatgggtcagctagtactgaccagcatctgttgagttattttgcataaatttggttacctggcctcagataagaatgtttttttaatctgtattggtggcattgttggttgctgatactgctgtagtttgttcttgcaagacttctgtttaaaagaagggttataaattcagtgtaactcagagcagaggtaaagtatagaatggaattagaagaaaacgaagcatcaatttcagtaaagtagaaatcgtttattaaataagcggtgggtgacagggaattgggagtaaccatcctggttcccatagtgatggtgcatccaggaaaaatacagggaaaaagggaatcattatggaagagttttgggtgtgtgttgtcatgctttaggaaacttgccaatttctacacctctgtcttcagattgtcgtgtttagacacacatcccacacaaagtgctcagcagtacttcttgtgctcgtctttatcccctggaatctagaggatggcacctctgggggagttattgtctcacatgatttagaaagacctccactattttctttccaagagtcgaaggaaggtgggtgagttggcctggcacctataagcagggacctacaacactgcttgaagcacctggtgacatctgcttgacaggcttcccctccccactgttgtcaccacttccatgggtggtgggtggtgttgcacggtgcccatggggtggtgtgcatgttctccaatgccacctgccctgcctcagtgctgcctcctgtaacagtctcatttgtttcgctggagtatccttatcgaaaaggtcttggggaccatttgcctaaaatgttccccagcatgaaatgtcccccacacttgctctgcacccgtgcacatcctccttttctttttttttttctgagacaaggtcttgctctgttgcccaggctggagtgcagtggcacaatcagtgctcactgcagccttgactcctgggctcaagcaatcctcctacctcagcctcccgagtagctgggactataagagtcccaccatgcccagctaattttaattttttttttttttttttgtagaggtgagggtctcagtatgttgcttaggctggtcttgaactcctggcctcaagcagtcctcttgcctcagcctcccactgggattataggcatgagccactgtgcccagcctcctcctcatttttgtagacatatcaagtctggcctccttcaggaagccttccctaactaactaatcaagctccccgtgtttctttcctttaggatctattttttggatgtgtatggtttaatatacccttaagaataatgcgtttggaattgtaattgagaagacaaggtttacgttagcagattatagtctaactctgatttttagaaaagtgatatagaatagagacttaaaaaaaatgacattctcacataggttttggatatttggagataggaggaaaaacatgtctttaaaccacacaatgggaagtgaagtgtttgcaacaaccagaacatttaggttataaagtgtcagagcagataatttaggctaaaagaaacaaagttaaatgatttggtgggggcttgatttctctggattgacccccctggactattggctgtttccttcacttccagactgtctggtaagatttttctacagaggtaccttcttattaatgaattcttcccatcacacccactctgtttgaatttctgaattaccttctccttttggtttctgtatctcaactttcttcttattgagtcttctctgacagtttctttgagggtattgctatcagagtcagacatgcccatgacaagattccaggctgtgtaatcttgagcaaatcaatcttgctggtctactttttttcttaaaagaacaaggaagcttgccttgcagggtggttagaatttgagacaatgtatgttgcatgcccagcaggtggcaggtagctaataacaggtgtgtgcttgctctacaccagggatcccctcggtctttggtctttgcatatcatagatactcagtaagcgctctcccaaaggattactgacttaacaggtagggtaatgtttatagccaaggggaggtgagtgtcatcaggcccaggtttgtatgcctatttctactgaattgtcgcaaagttatgtttcatcctatttaccaagttgtatttacagaagactagtcctgttataacaaagcccattgaaacaacacccaggaagtagaccacaagaagtcagtgggtatcttactctgtgtcctgcagggggatctggaaatgaataagggagagagaaaatgtggagtgcagaggatgctgcctggaggtgagactttaaccacatgattattctcagttatggagcaatggctttgttccaggcattgtctccaatagtcacaatcacaccatagggctgatgttttttctatcccactgaggtgtaaacagaggccccaagaggttgcatctggaggtgcgtgagcaaaatttggagagaagtaccaagtgggcacttcacaacaggtgaagagaatgaagagatggataaagataagtgttaagcactttttggtggtactggaactttatcatgtctcttgatttttaagaaaagtggcctattgactagaatttgagactttcattatattgttcagttggcttttgcatgtatattgcttttatgtttttgatgcgttttttcaaaaccctttaaattagttggattttatgttgttcttaagtttgatgaggtagacacttttttagctgggaggaatagagaggcagtgagtgtgttaacagaacacagcaacctcagactccagcccccgctctccttttatccagcggtgtgacgttgagcctgatgcatgacatcttggcagcagaggtgctggtgctctgtcaggctccgggacccctgactgaacatgcctagggtcatgaggaggtttttgttcctgtaacattggccacaactgcacagccagtgggtgaggatgctgagatacaaactgagaattttgcacttcgacctaggctctttgctagatcaaacttcttttgatgtcttagccatgatccctctgagatatctctctccaagttattaatatatctgtgtttcccatcatgtttccccttttgtcttggcttcaaagaagctcagagctaaatttattgcttgattatagttgctggattggccaaggtttaaaatttatgtttttaacttttttatgtgattccctccccattttcattttgatagtcttattgtttattgtatatcaccttaaatactttgagaagtagatcgggtctacgtttaaaaatcgcgtatgtgggaggagagggccattcggcaaatgggaaagagattggggtgactttggccaaaaaagtttgggatagatttttgtattctcttgtattatgttattccctatcagatggtctttgcagctcatttttctgtcttcttctgtgtggtcagaatcaggggagagtttttctttataaaaatgatttgttttcctgatagaacagtgctggtgggtaacattcagttctgaccttgtaggcagacctgggattcccagagggtgcagggaccgcagcactcactcttctttgtgacaggcctgaggcagcttccctggggtccccagcctgcctcctccacggctgctatggccgtgggcgctgagcacgtgcagctgctgcctgatgctcctggacagggaaggatagattttgggcatagttactaggtgtcactgtctccttttttcagcctggcttttacaagtagttgtaatttacttgacaaacacttatttggcatttccttcaatacgctgggtactgagatggttactgcatttttaggcatttaacggggataatagcatcatcgttaataattacaaatatgatcgatccatcatataggcaatacatttcagaagaatattattaaaaagactcatagtagtgggtgtatgcagctgtagtagaggagctgaagccactgagttaccccggggttcaagatggggagcagcattcccatctgtaggttgtgttcttgagtgggaaggcctccttggatacctctcgacagtaattccaggtacttgagctcacaaagaaagtgtctggggccctcagccctttggtgtggctcccagggacgcctgagttatttccagaagtggcgtggtgggtagagtgtgagggcaggcctcgcctccctgcccctctcccctgtgtggcttttcctttctgtaattcaactgattgcttttccttccaaattgctggcttaagctttatcttatctaattttatctcctccagccttgtacgtccagagcatcattagggcctgtgcccattctgtccctcccacttctcttggtctccctccacgtcctgaggggatagaaagacggagtctgcataacctccgcatcttcctgcctgggagggcggctagggtggtgcctgcagcctctggaacctctccattctgtgtgcccctcaacctcatggacatactggcgtttcaggacctggccctgctttctctgtccccgtctctctctgcccactggtttctgtgacccacgcccttcccaccccattctgccccttttcctcacttgcttttcttaccttctgtcacattcacatgctcactatttctttttactccaagcatctgttcctctaaatcatgaactgtagttggcataattaaatatgtaatgtgtttattttaatatcaatatgtcttttcatacacatattagtaagagacttggctgtcagcgccgggccagatcaccatttgcagatgtccactcacgccagctcccccacggaacgtttcttatgcacctcatcagttctctttctccttgtctctctttctgtctctgtgtctctttgttctgtgtacatctctctgtatgtccctggcttcctctctaacacaaattgctccaataggccggcaccttttcctctccgtaaaccccagtttgtaggtacacacaggcacccaggcaagggtagagaaaccaaagagcgcttgttcacacttgctcacacaaggaccagcagagacctagagctgcatgccacgtctttattatccttgctgctagctcctctggtacagcagcactgtgacagtttggaatttgagcctgggcactctcccctgagtgcatcggtgacgtaaaggcaggcaggcaggagcaatcacagcctcccgtcgcctgtgtgtcccaagtgagccccctccccaaagggatgtagggaagccagtccatctgcaaggtatctggagtggagtgacaggaagcagaggatccagtattattggaatagattacatggtatgtgcttgtcacttccgtttaaaggtaaatacaaatctgtctttggcttagaattctagcctcctgacctggggggtgaatattgactggcaggctttacctcccatgtagaaaagagttgcgtgccagggttataaattagagctctgcattggatggatcttcttaatgttttctgtggagtggaattagaacatgttgtttcttttgaggttgcaaaaagcaaacaaggatccctttcctcccagactagtgggaagtagactaattacttgaaatcctgttttatcagccataaaactgagatgaaagctggggcagttatgaagatcctgatatatcctagaccacaaatttctattccttttctggaagagaaaaactgcattttaggtttagataatttggtcaaattttttaggctatcaaatgcaaagattaagtttctagagtcttgaattttagcacagagatagcatcacttaaccttcccgagtgaaaattcctgccttctaggtggtggggaagatcaaacgagctgtggatgccagcatacttaatatgtgttcagtagatattagtgacagattcagtggatatgacggctgaaggcctgggtggctcttctgggcttgttggttggtttcattataatgtatatggttggacctaagataacccatgtttgtgcttctgtggacactggtgctttcagggtcttaactatattgttttcatggaaactttgaaaggactcatggctccaaaaggggctgaaaagttttgaatttccttttttctttctttgcaaaagattttacagcttaagtcatgtaattaataacaggggaggttaagagtcaaagatttttctcttaccctggtcattttcgaagctgcacttggcatgggttgaagcaaatttgtgtcttcttgaccatttacttttttttttaactgagaaaatagattctatctctaatgaagtaattgtaaacagccttgttaacatatggtactgattttttcacagaagcattgttgaaatgcatgggaactaccaggttaaaagacataaaaatagacaatctatatagtccagatggtatctccaaactaggggatccaagtggcatgagaaactgtctagagcaggagtggcaaacacggcccccgggccaacacggccttatgcctctttttgtatggcctgtgaactaagaatggtgttttacattttttaatgtttgaacaaatagctgaagaatagtaatatcttgtgacatataaaaatggtacaaaattcacatttcagttaccataagtaaagttttattggaacacagccccactcatccatttacgtattatctatgggtattttcctgctacaatggcagaaatgagtagttgcctaagatatttgctgtctggtcctttacagaaaaagtttgccaatctttggtctagatggtgaggaattttagttctcctatgtgttaactgatacatgatttcgttttgaagttcagcttttaactttcggttatttttctttctacttttattttttactaataaagacagaagaaaaccatggctggttagtctcactgctcagactatgccttctaatgtttttgataataaaagttaaaatgcacatgctaattttatttcaaacagtataagaaagcaaaatctctctcctacattgtcctttattccaattcctttacccagtgttaacatttaatagttaacattccaaaaaatgttttgtttatactagaatatatattcttttcaaaagcttttcttaagcttagtttactagtaaaaatactcttaaccttttactatgaaaaaaattcaaatatgtacagcacaagacagaaaagtgtaatgaaccctgtgtacccatcattcagctttcataactcttcgtcttatagccaatcttatttaatttgtggaatccatttcctgtattattttgaagcaaatctcaggtatatcatttttttctcaggtatatcagcaaatctcaggtatatcattttatctgtagatatttcagtatgtatctctaaaatataataacttttaaaaaacataaccacagtctgctaacacatgagaaaaaaataataattccttagtgtatatttgagcactgagtattacctataattgtctccccacacccacagttgtcttttaaatgtcatagtttattttactctctttgaattaggatacaggtaggtttcacacagtgtgacttggttgttgtcctttaagtctattttaatctgtctgttccctctgtacacactcttttatcctccttgctacttattttttaaagaaatgaggttacttgttagaggttttacatccccatagtattgtttaatatgttcctctctcctctgaatttcctgtgaatttggtagttggacctacaggctcataacattcaagttttgttttattttattactattttttagctaggctacttcactggtgacattgagtccttccaagaggaggcacttagtatctgattgtccttttttgtgatgttagtactcattgatgtttaatgtgtagatcaagtcattccttatgggttgtaaaatgctggatactcttagttctatgatttctgtgacatttattggcttaaatgtttgatttttctccatatttaccagtttttgaagttttttttttttttttttttttttttgacagagtctcgttctatctcccaggctggagtgcagtggggtgatcttggctcactgcaacctctgcctccacagttcaagcgtttctcgtgccttagcttactgagtacctgggactacaggcgcacgccaccatgcgtgccatgtctggctaatttttgtatttttaatagagatggggtttcactgtgttgcccaggctggtctcaaactcctcacctcaagtgatccgtccccatcggcctcccaaagtgctgggattacaggcgtgagccacagcgcctggcctgtttttgaagttttgacttaacttattagtaccctttaacagtgactggtttgttttttggtttttgtaatttttaaaagtatgatatattttagcatatttactgtgttctgctgaagttactgaccctcagatcatcccccttgtggtagtgtgaaccttctcacattggtccctgtgtctgtttggcatgacctagtagtctctgatagctttctctctttctggtacaacaagatgttttggattcatcttacacatttcttgccctggatctggaatcagccattttcttcaaggagtcagtcctgctgctttttagtgggagatagtatttcagaactaaattttgggttcagaggtacatatccataaacaaacagctttttatagtaaaaacacatagagaaaatgcatacagtacaacaccaatgtagcctcaaaaaagaacacagcagagcaccgcaggggatccctttctgaacacagtcttctcccacttccctcagtcaccactcagtgtttatggtaatgacttcctcgattttctttcctgtttgatcatttaagacaaaatacgtccctaagcagtatcacttggttttgtctgttttgaattttatttaaatggatcatgcttcctgaatttttttttttgttgttgttgttcgagacagagtcctgctctgtcgcccaggctggagtgcagtggcgtgatttcagctcactgcaacctccgcctcccgggttcaagcacttcttctgcctcagcctccctagtagctgggattacagatgcccaacaccatgcctgactaatttttgtatttttagtagagacaggttttcaccatgttagccaggctggccttgaactcctgacctcgtgatctgcccgcctccgcctcccaaagtgctgggattaccagcatgagccaccgtgccaagcctcctggattcttttatatcttgcttctttcattcaacatgagattcatttgttttcattttctttgcaatatgatactccattggatgagtagaccacaatctatccattctgctattgatgtacagtcaagttgtttctagttttgtgctgttaaagaattgctgctaaccttgtatctgtctctggttgcacatgtgcatatgtttttgaagggtatatacatagaagtcgaattgctgggttagatgctatgcatgtcttctttccaatgtgtcatgccagctgatatgctcaccaacagcgtgtgagcattcctgttgcttcacattcttgcccacacctggaattgtcagactttaacatttctgttagtttgttgatggaaagtgatatctgactgtgactttggtttggtgtttctctgattaccagtgaggttaaacacttctccatatgtttgagtattggacttttctcctttatgacatttctattcaagttgtttcagtaagtctttggttcattttcccattgagttatcttttattgattcataggcatttttatatgtattgggtacaggttttgattggttgggtgtgttgcgaatttcttcttccactctggcttatcttcactttctttatggtgtcttttgatgaacacattcttttttttttttttaaacacaaatgctatttatttgtttgtttgtttatttatttttgagacggagtctcactctgtcacccaggctagagtgcagtggcatgatctgagctcactgtaacctctacctcccaggttcaagcgattctcctgcctcagcctcctgagtagtggggattacagacatgtgccaccatgcccggctaatttttttttttttttctaatggtagagacagggtttcaccatgttggccagcctggtctcgaactcctgacctcaagcaatctgcccaccttggcctcccaaagtgctgggattacaggcgtgagccaccacgcctggccacaagtacttttaaaattttattgtaggacgtcttcctccactttgttgggatatgtggtatatagtaaagatttcaaatatagtaattattattatatactatttagtattatatgcaacttatatatgatcttttaaaaaaagtcttatatctttgcctttctatttaaatttcctttaaaaaaaattgacaccaaagaaataatagtgtcacattgtttgcaccttactttttcacatacaattttattctggagctctttctacattatccatatgccagtcggcttcattctttgtcatggtggcatgatatatgtatatatttttttgagatggagttttgcttttgtcacccatgctggagtgcaatggcgtgatctcggctcactgctacctccgcctcctgggttcaagcgattctctggcctcagcctcccaagtatttgggattacaagtgcacaccaccatgcctggctaatttgtgtatttttagtagagacagggtttcaccatgttggcccggctggtcttgaattcctgaccttagctgatccatttgcctcggcctcccaaagtgctgagattgcaggcgtgagccactgtgcgcggccggcatggtatttcattgacagaattaaggttgtttttcttgtttaaaattgtgctgcaaaaaactctggtacataatcttgacataattttgcgagtacatctataaagcaaattctaaacatgggaacttctgggtcaaacaatttgattgttttaaatattaatagacaatatttactcccagttaattcatgtaaaatagcagttcatacagcctaaattaggaggtctaactggccatattcagagaaattatctggatatgaagtaattttttgttaggtctaacctgtattaatgacaatatgattacagtattttcaaaagattgacacttagccattctccatgtttcaaaggaataaatgctaatttagccaaataatagtttggagcaaattttgtgggagagcctgcgcttgtgtggagcaaatcccctgtcgtgttgtgaaatgggcgcggagaagcctgttctagtgactgtcgatgctctttgtgacagctaacgtgagggctctccggctcctgagtcatcctcctccccaaatgggggactgaccagtcttttggatctctgattttgttaaagcggaaatgtttttctctcccattccagtaattctttgagtatatctgtttttcttcagatgtttcgtgagcacctgtgttctggggaatagtgaacaccgtgaggaaggtggagtgttgactatgccatccactgtttgtcttcaagcagattactgtcgcgtaggggagttgtgatgtagtgtatttgtataacggtcttttaccataagtgggtattactccctccaggacatcatttaagtcaaggcagctgagacaatcacaaaagaccacgtattttatgattccattaatatgaacatcccaaatagggaactctatagaggcagaaagtaagatcagtgattgtttcaggcaggagagagtggggtgatagggaggtgatagctaaaagatacagggtttctttttgaggtaatcaaaatgttctaagattgaccatggtgctggttgcatatatctgtgaatatattaaaagccattaaattgtgtacttaaatgaattgcatggtatgtgaattatgtttcaatgaagctattaaaaaacattaaaaacaagcaaaaaatgcaggttttttttttttctcagttgtctcagtgaagttttccctgtaggtttcatagttactttaattgaatggatggtaaagagttgtctggtctgggctagatgcagtggctcgtgcctgtaatcccagcactttgacaggccaaggaaggtggattgcttgagcccaggagtttgtgaccagcctgggcaacatatggagactttgtctctacaaaaataaaataattagcagagcatggtggtggtgtggctgtagcactagctactcaagaggctgaggtgggatgatcacttgagcccaggagttcaaggctgcagtgaggtttgactgtgccactacattccagcctgggcaacagagcaagaccctgttgcttaaataaataaataaataaataaacaaataaatattcaagaattctcaggtctggatgtagggttagatgcaagttagatataagtgaaatagccggtttacttaccaatagacaggaaagtagtcttttgtgattcccttctccactaaatacaaatcagtgctactcaggggctctttaaagaaggagttggccaggtgtggtgactcacgcctgtaatcttagcactttgggaggttgaggcgggtggatcacctgaggtcaggagttcgagaccattcctgaccaacatggagaaaccctgtctctaaaaatacaaaatcagctgggcgtggtggcgcatgcctgtaatcccagctacttgggaggctgaggcaggagaatcgcttgaacccgggaggcggaggttgtagtgagccgagattgtgccattgcactccagcctgggcaacaagagcgaaactccgactacatgtaccctaaaacttaaagtataataataataaaattaaaaaaaaaaaaaagaacagcagcagtaaaaaataaataaagaaagaaataaataaataaatgaagaagtcaatcggtaccataagaaaggacaaaaaccaaaacaaacccaaagcaaaaccaaaaactccccacaaaccagcctcccctaacccttttaactcaaagcttcgtaatgtctctgaatttataattacgattttaaagagcactgtttctcatgccccatcccccaacccatttcgggagtaaaccttttctgtcagggtgaggagaaagtgggtaaaggacttcagcatttacagttgagttagtatttgttgttctccaaatgtgcaggattcagggccctctctttggtaggtgtgtgggaatctattggtatttattgggttcttaatgcctgcctgtccttgtgtaagacactctggcagtacccaggaatacatcaaccagctgagacaaacatgaagaataattattgtcctaataatagctaacatttattgattgcttactatgtgctaagcctctaaattttaaagttgttgtaaaagcaggaacaaagcctgtgacatgtaccattgtcttatttagctctcagaatcacagtggtagaggcactctcattattttacaggtgaggaaactgagattcagagggcttagatatctcgtccagggtcacatggctggtaaatggtagattcatacccagatcagcctaacagatctgaactttttcttgttgggggagaggggcaatggaatttttaacattttcattgcacaaataatgcaaattaggcaagaaaagcacaaagaagaaaataagaatcatccatatttctacacacagatttgctcatctttaatgtttctgtgtgtttccttcgtttgtgtttttatgccttctgatttatttttatatccagtcaatctctgtcagcccatcagtgaaggccattgctaattcattaaagaccttgggactgaggacatacaaatcataatcaggatatttcatggactggggattgtgggtgggggaaggatgcagatctgacaaattcatgctgtggtctaactcagagagggtcatcttgtcccaaagtgtcccctcagtctttctctccttccccaattaagactgtcttgtgaaataattaaaaatatctataaaggggcaaattttgcagcacatataattatagaaattatatagtacaatatggacaaatgcagggctaacagtaattcttagggctttcacagatgggcaaggttgggggtagggaccggctggaggcaaagagaaggcttcctgagacagaggggactggggctggctcccacccagatgaaaacctgcaaatctcagggagaaagcttcatgcactatgaaaaggtcacaagaacctccagtcctgggatgatgcaggcaagggaaaaatcaaatgggactttccccattgagtcatcaatcatttgcctggtgattggtgggagtcacctgtgtgttgtgcctgttcccagtgggaggttagagcttcatctctgaattaatatcaaaagaagagctgtctttacaaatcaatatgcttctcacaaggggatggcatatttagatgcagaggttggcatggcgaatcggatggtttgagggtagtggggcatctgggttaaaggccctgatgttctacagacttgggtttgaatcttagctgtgctactctcaagcgctgtcacctggcaagttgcttcatccctcattcgaggaagtggggccactggagcgtctacctcataggcttacaggtggttgggaggattaaatgagatgagcacatgcagcatttagtacagtgcctggcatagaataagtgctccatagggattagctaatgttttataattctaaaggggaggaaagatggatattaaggttggagaactatggatccttcccattgtattcacaaagaaaaccatgccatgaggcttttttggcaagtcactttaactttttgggcctaggttttcttaacagtgagatgctgggtggttctaaatgatctttcaaattctgcccatgactataatcctatgattctgcagttttaaagagcatcttaatgaatacaaagtacttgccagaatattttcttttttgattctccccacaacagtaatgggccgatgatgattcctgccattttcccagaccaggcagcagagctggcagacatttaatgactctccctcacaaggccatggagctcgtgagagagcataaggccaggttccctttacacacatgtggtgtgtaaaacggatgtacctcgattgggcttttgcccttgtcatggaactgagcccgaaggaggttcttagaggagcggggtgaggatttcaggagaggtgattcccaggggagcttcaggccaggactgtcatagtagagcagtaatttatgggcttctgacagcttgaaaaggtcatggtgttcttctttacttataaatgaaaacaaagtaatttgggggtcagggaaagacgaaagggcttgtgcagactgacctcaaaatccctggtggttatcatgtaaaaattcgatttgtttgatgcaattagccaaacctggacactttcttctccttctcaaagcaattgggattcagggcacaggataaaacagagttggggcagggggcagggaggaggcgctctggcaacagtgggaagtccagattgtttctattgtgcgtgctgatgtaattctttttctgcaagccctctgtggtttatcactttgccttcatgcacccttcttataaagcaattacagaatcacgggaaaataggcagtagcagtgtgaatcagtgccttttggaatggagaactgatacaaactgggcttcagtttgcagagggttgaggaatgtctaaggctcgtggatgggggaaggagaagtgacaagggatcacagatattgtatattgggcctctttggccaggccctccagtccccgaggcccttctatgctgcttactggctgcatgagggctgtggctgtggccgtcgccgtgtcagctgagcttgtaatttagatgttaccactgctcaactatgaaaagtcaggatcagcagctttgtcctagtgctgggagggaggtgtgggccctgggggaaccggcagctggatttagagtgtgaccgattccaggaacccaacagagctgcactagggccctcctcacctctgtgggtctgaatttggggtagggttccccaaaccaaactgtccagacttttctgtattgacattgagtctatagtcattagtgatcagggttccgattaatctgtgtccttattttagagtagcttttggcttagggttctggtgaccaactggtcacaaccataatttagcttctgaaaggccataagagtcagaatttgtctaacaggaatctccacagagatcctgctgcatttataattgggcatttcctctgcatttacttttgccccttgtctcctactccaagccacccccatgtgcttgaatgttgaaagttttgggttgccaggctcaacttaccagcatggttccatttctgtgattattactaactgcattgcatcatacacagagcaagtggttggaaaatagacctgcgtcctagcagtgggcaagagactcgactctcctgaatctcagtgtttttacttttaccatgggagttgtaaaatatccagcccagtataacattggctggatgtaaaacagcctagtatacaacatgggctttgtaaagtgaggtgctgttggaaagttgtttgtagtaaattgtattattacatactatacttatatagtaccaaacattggcccaaagagttttattttgttacttctttttgatctcatcaaccatgccatgcaaaaaaagaggcattttagaaaagagggaaatggaggctcatgtatgttgagtgacgtgtccaggattatttgctgaataaatgtcaaaatcagcagtacaactaggtgtctggaatcttagtccagtgcacctgtcattgtgtgctgggtgcaaggcattaaggctcactggttgtggtcctaagtgctcccctgcctttgcctgcttgccccccattcatttgttcattggctattatgagagcagctgtaagccaggccctgtgttaggaatgctgctaacgagggcaacagggctcttgctctcttggagcctattgtctagtaggggagacagacttaaaaaaatattatggcgtcaattgattctctttattttctgcatcctgtgaatgcacaagggcccagagtggagagagacttggtcccctcatcttgggctttgtcttactttctctttccttctagaaagttgtgagtcagttctttagatgggtgcgtcagggttctgccttcctgtatttgaggctttgtgtacttggtagttggagatgatggacgttgcatttgtgtgggctgaagagaattaaggaagaaacgaggcagggaagtttctccgaggaggcacattttgaacccgctgttaacgattatggcagtggccctttggaggcagctgcctctcttgctgactgtcatgacccaaccatggcaattttcactgagactgcaccttctgtttgtgatgttttagttcaggtttacattatctgagtagaactgggaatgacaaggctatgaggtcctgcctatgcccctctaacatcgtttccccaccagaagttttctcctgaggatgtattaaatgccgactacttccttggaattgctggatagcctttccagcgtgagcaatggggacagctccagaagagtggcacatcaggccagggaggattatcccagattttacagctgggtaggtggaaggcaggtctggcttgtccccacttccatcaaggagtagaggtgatttgcaaatttctctgtggtttggtttacttctttctcttggtcctttgattctttccgccttcgtctttcctttttctttctctttgcacctttctcccctgaaagatcacttggcagaatggttagaaagtactacctttgtggcttagttgatggtgcacaaaataactgaagaagaaaacataccttggctttgcagattgtatccttctggagagctgaattttccagagtgctaaagctgaattgtatccattgtaagcaacaaagctttttttttttttttttttaaaaattatctttaaagaatccattttaaaaggaaattctctgaaaatacattacacatttaactaccttcagaagcagccggctgagaacttaacccgacattctctccatcatgccgggtcactgttaggaacatccaagattctgctgtgctcgagtgatggtgccttcaggttgcttgcccctgcaggtggtggctccagagtcttagacttctctggttcttctttcttttcctgtcccatctggatcccccaaaccctgacccctcagactgttaggtattatttctgcttgtattatctctccctttctgatttgtgtgttaagaaacaagacagcaatttatttagaaatataagaacagcatctgccatgtagtggttcttattgtagatactgcaatagtttgcataaacgttcccatttaacgtccacacagatctgtgaggtgagcagcattgtgatccttattttacagaggcagacgctgagtggtagagaagatgaccacatattctccttgcctggaatacaggaaatgaattcaacattcattcattggggacttctattgtacttgttagatatcattagttaaaaataattgatgttgggggtgttgagcagtaacagaagagttaaaaaatagaatattctcatagtctggttatgtacagggcttcacaaatctttgtgttgttttacagcacttagcgggccttaagaatgagagaaacagtctgcaaattaaatcacaatgcagatgccatcttctcactgctactgtggggtttagctctacagatcagaggatggctgagtatagtaggcattttctttttgtcacgtactgatgtcacaatactttgtgttcttttatgtggtctaattgcttcaaacttgaatgtgctttcatttaaatccatttatgttgcttttgtcaaatgggaatgatttccatatgaatttgaatttacatactcataggcccttgagaccgtgtggatatagtgaacccaactcttggtagacttgggctctatttttgcctcagccactgacttgttgacttgctgaagggccttgaacagaaatgattacttttctggacttaacactcctcagctgtaaaatgaggtaggaaatctgatgtgatttctagttggggacattctagaagattccatattgtatctcaaatgactgttcagagacacagtctttaggtgctcactctagagaggactgtgataagcataaagcataataatgtaaaccctaacttacaagtttctttaaaagttgactcttaagggtattacacttgctcatattttaaatatttaaaaacaattaaaatttttttccttcatattcaccattggcttttcaagcatgcacagaagtggtgtgcagatcgtttcagatcaatttatcataaaatctaagttgataggtgttctcttaatgatgttcttatactgcctgttcaccttgaccctttagctttgagtagattagagagtgtaggggaaagatctttttcccttcaaatactcaaaggatcatgtgttctcttgagcagttctgcaaatccatataggacaacaggagaataaggatttaaagtgaaagatttcagtcggctgctgagctgctgggaggaagagatggtgtgtggtgctgacctgtccctgattgcccctcatagaaagcgaattggctctccccacgttggctcccatggaaaggactgatgggagagagagtgaggagagctggggatgcccttccagaatgctgaccagggcacgtgggagcagtggtgctggctggccttcaagatccctttctgcacatgggagctgaaccagtgagatacagcacctggatcaggcagcgcagaggagcagtgtggttctcctctgtggtgtgaaattaccctggaaccaccaagcagggttcaacagcactgatccctcccatcaacccaggtctaggtctcactccctcagcaccatctcgcagcttctagcacccctggaggctctgtgaacctctcaccctgcattccttgactcttcatgaactgtcggccttcctgtgtaagtgggtcaggcaccatgtgacctgctcactgccagtttcttctttgaatagatgtttatttcatggatcattttgaagattctccgtgggtgtgcaacatggttttagaatgttgggtaatttctcatgtgttctttgagatggatggcttctcagtcgtctttgcagtcagccactgtagacttgagtttctctcttgctgtcttcattttattgctccatatctgaggaaaaccatgtgaaaaatccctagacacataggagccctgagaagtggtggcagggaatgcttgggggacaaaacagattttagagttacgggtattttaattaaaaaaagagagacccagaattgtttttcacttaaatgagcaattatatctttaacttggggatggaaatatgttgtgaaatttgtttagtcagctccctctgaaataaataaaattacagtgatgatatcattcttgtttaaaatgtttgaaaaggtatcaagacaaagtgattaaggcctaactgtttgccaaattttctttaaagctccatttttggggtatttctatgccaaaaaacatcttaaactgatgaacatatagttctccgcacttgtattggctggtttttaattagatgactgttttaatagtggaagaaatacatttaggttgggcctaagccccagggtgccagatttcaatcccagaaaaaaatgttctctctgtttagtgctaatgtgcacttaaatagcacaggtgtgagtgcttttccctggccacggtcacacatgactttcccaagggctgattggttatggggttggcaggtttaaggtcaggttccccggcttgccctccacccagaggagccaggactctcaggctccctgtaagggaagaagttacccagatcatgagcctgttttgtctgggtcagactgacttgagccacagggagtgggtacagaagcctgggttgctgccgggtatgacccgaccttcgtcttgtacccactgtctccttccttttgtgagtcaccagctcacacatctacatgcctgtaaatgaactatgaggtatcgagtatgtgctacctaccgtggtggatgctgggaaggatgaaccatgcattttcctaaacccacacttcgaggtttacaaagataaaatctcatggctctttgccatccccttctcaagaaccttcactggctctctttttagttaggaaagaaggtccaaagcaaaagaaaggaaacacagggtgtgaaggctggactcctacctaacacacctgtccattccaaacaaactggccgtgcctcctcctcgatctcccacttgtgtgggtggctgtgtcatttctgtgcagcagctgatggtgaggtctttcacttggctccatggtgaatggggaaattctcccaggcactcttcctgcctcatctgtgaccgtttgtcttcccctggggctatagtttgagtactaggtggtattttcagtcttgtctttgccctgaggatgcagaagtactctatggctatcccactcctgacctatgcccaggccccctcttccctctgggggtggatcccacttgtacgggcaactcagtgcagtaccctggaaaatggcagacctggggtatctctggtctctgccactgtctcccagtgtgtgtggaggggctgtatgcttgaggcattattttactgtggcttacctccttggtgttttctccaacttggagcttgggtgagaatgctcagggcttggttgacacctcttcattgtcccagaggtgtaagggctgggtcggaagctatgccaccagaagccatgctgccctttccaccagatacttctgtttctcttctcgacatagaccaattccctttctttctttttctttttttgagacagagtctcgctctgttgcccaggctggactgcaattgcacaatctcagctcactgcaacctctgccttccaggttcaggcaattctcctgcctcaacctcccaagtagctgggattaaagacatgcaccaccatgcctggctaatctttgtaattttagtagagacagggttttaccatgatggccaggctggtctcaaactcctgacctcaagtgatctgcccgcctcggcctcccaaagtgctggggttacaggacatttccctttcttgtttgatttctcctggtatcttctttctttctctttggactttctttcctatctcatatttattttgcttggcattgtagtagaaagataacatgttaccactttaccctccagtctgaacttggaactgctgccatacactaaaaggatttactattcttaaggatttccttccatcctaaactacaaactttttcaggtcaggaactacattttattttgtgtattcccactgtaccttcacctgctgagtgcttaataaacccaggacagaattgaaggcaggctgagcctgtataggagagcagttgctttcaagttatgttaaaaactcctgggcgggagcattcaaaaattactcatagataacaaatccagctacctgcacgtgcatgaaagcagggaactagagccactttcagacagtgacttcagcttaggaaacaaaaggttactttaaagtaatgctgttttacttatgtttaaccaattctagttgacacacttattcagaatggccttactgccaattagtggagcatgttagtgaagtttgtaataaagtcctaatttccgtgactaatgaagctttacttgtgttcaacacaatccctgctctcagttatgaagttataaaaaaatgtgtttatgctgttgctgccgctgcccgtctgtctgcctccctgcctgcctgcacagtctttaagagcactgttgctctcctcctgttcctcacgcatttcaagcacaaatccctaccattcatcaaaggcatttgctggtggtggcaggggaaatgtcacagcactgctgccaccactgccaggtatctttttaaaatgtaatgtgtgtgtatgggtatgtgtgtgtgtatgacttccaccatttctacgggaatgttttttgattagaaaaagaaatagttgttacatttgcaatttgtaaccagaaccattttctttccaatgcagttgtaacagtgtaatgataagtagggtctttatccaaccctatgacaagtcacatgtacacacgccagacataggctccagattctgtaatatttagccctatacagtcaacagatttgattccctggcagtcagtctttgcattggaagagagagtaaaaattaggactggtgagttcaaaggttcttctaaggcctaagcctttgcagtaggagctttccatactagatatgttacctagagacttgtgttaaagtggaaaatcatgggctgggcatggtggctcacacctgtaatctcagcactttgggaggccaaggcgggcagatcatgaggtcaggagatggagaccatcctggctaacacagtgaaaccctgtctctactaaaaatacaaaaaattagctgggcgtggtggtgggtgcctatagtcccagctacttgggaggctgagggaggagaatggcgtgaacccgggaggcggagcttgcagtgagccaagatggcaccattgcactccagcctgggcaacagagtgagactctgtctcaaaaaaaaaaaaaaggtggaaaattatcatacaaatcatatttgtgtcaatctttgtgagggtgtcctaaactgtaagtgtgcctatatgtgtgttttaaaaccagaatgtctagtattgtaccacagaaaaaagacgttacaaaaatagaaattgtgtcagtaatttgcttttactgctatgaacaatcatatgcaattcctacaagtcatgctgtgtctagcctcacagccccctcactctccaggcctttctgccaaactcagcttctctgtgagcatgccctgatgagttcaaggggctcccttcttcgtgccaccacctttgagtccacaacaggatggctgttgaattgaacatgcacttagatttcgttaccgtttcctaggtctttttcaaatacattccgcttctctctttagttactttttagtctccctcaagggtagggattagattcttctttgttccctctcccatagcacagtttatgtggcttttgctgcgtgaggttaaagcacattggtggcttacatcttatccatttgtaaccacccagggaccagcacatggccttgtacccagtaaacaatcaatattttgttgattaatgatgcctaaagctggttaagttcttggactcaacattcttctgagctcaatgactatttgcattctagtcataaacaggaaaaggttctgttggcagccagggagatagtaaatacccctgactctcatacattgacttaatcagaaacaacaacttccccttttcaaatttgcattgtgaatgataatatcattttcaaatatgtaggattatgacattttaaagagaatataatgaaatagaatgaaggtgaaaacttgtaattatattagagcaaaactatgtttcccatagcttatatcctactatttctatgtagtgtatctggcgtggtcccatgaggatgccataaccaaatgattgaactagaaactgagaaagacttatcaaacatttagtgtcacgggcttgtgagatgaatcaatgctgggatttccagctatgttttttatggccctgtattttacaaagctgtggaaaatattgagcatttgaacaaggctctcagtcacagtcgtataacaagatgcaggatagggctttgcccgtggagttcagtgtgaaagtggctgtggttggtggaccttctgccctttcccctattgctctctggctgctttttctggtgggtgtgtgtgtgtgtgtgtgtgtgttttttttttttttttttttttctgaggtacttcccagggaacagagaaataagttgacaaaaggcacatataaaagagagatctaggactttctaaacctgaggcccacagccctttcatttaatgctatattggcacatgtcttttttctcttcaaatcattctcaatcatggtccatttctcaccaccccctcctcccaacttgttatcagttgcgcctgaccttttgggaaggaagaatctttaaaccctgtttgcatctcagcagacgggaatgcctgcctacttctcatctagggctcctttctctgcctttagaaattcttttttattcttgatacacactgctcagattatttattaatttaaaaattaacatacagtaaaaatcggggtgtgtgcacgtgtatacagttctgtgagctttaacatataaattgttgtatctcttaccacaattaagataacagaacagttttgtcccccgcaaaacttatcctgcctcttgtagtcctattcttcctttaccccagcccatggcaaccactgatctgttctctattgctatagttttgtcatttccagaatgtcatgtaaatggaatcactcagcataatgcctttgatattcatccatgtttaggagtgtggagaaatcgttcttttttattgctgagtaatattacatttatggatatagtacagtttatccatttatctgttgaaggaaatttgggttatttccagtttctggtgattataaaaaggtgctagaaacgtacaggtttttgtatgaatatagatgttcactagcgtaaatacctaggagtggaattgtatatttaacattataagaagctaactgctttctaaaatggctgtaccattttgtattcccaccagaagtgtatgagagctatagttgcttcacattcttgccaacacttaatcgtgtcagtactttttattttagcttctgtaataggtgcgtagtagtatctcattttggttttaatttttatttcctaatggataataatgttatgttatttcatgcgcttatttgccacctgtttattattattttggtgacttggtgaagtgactatttctgtcttttgggtttctttttactgttcaatttgaaaagtgccccatatatcctggatccaggtcttttatcagatatgtgatttgcaaatattttctctcagtctatagcttgtctttctattatctctcttgctctcttttttttttttaatttttttttgagacagagtcttgctctgttgccaggctggagtgcagcgatgtgatcttggctcactgcaacttctgcctcctgggttcaagtgattctcctgcctcagcctcctgagtagctggggctacaggcatgtaccaccatgtctggctaatttttgtatttttagtagagatggggttttaccatgttggccaagctggtcttgaactcctgaccttaagtgatcagctcaccttggcctcccaaagtgctgggattacaggcatgagccaccatgcccagctgtctttctgttctctaagtgtgttttgcagagcaaaagttttaaattttgatgacatccagttacttggtttttccttttatgagttatacttttgatgtcgtatctaagaaatcttcgcccaactacagatcataaagattttctccagtttttttcctagaagttttatagttttacattaagatctgtggtctatggccaggcgtggtggctcaccgctgtaatcccagcacttgggagtccgaggagggcgggtcacctgaggtcgggagtttgagaccagcctgaccaacatggagaaaccccatctctacaaaaaatacaaaattagccgggtgtggtggtgcatgcttgtaatcccagctacttgggaggctggggcaggagaattgcttgaacccgggaggtggaggttgcagtgagccgagattgcgccattgcactccagcctgggcgacaagagcgaaactctgtctcaaaaaaaaagaaaaaaagaaagatctgtgttctacttagatttaatttttgtagaaaaagtatgaagtttaggttgaagtgcgttttcttttgcatatgaatgttcagtgtttcaactctatttgttgaaaagcctatcctttctcaactgaattatctgtacatttgtcaaaaatcacttggccatacttgactctatttccagactctattctgttggtctttgtgtctgtcccttcaccagcactatactgttttgattactacagatttattgtaagtcataaagcggggtgacttgaattctccagtttcttatttctcaaatttttgtcgttcattttaattcctttgtcttttcacataaatttcagattcagcttgctgacttctaccaaaaaagcctgctgtgattttgattgcactgaatctatagatcgatttggggagaattgatatttcaatcatattgttttctaattcctgaacatgatatccttctctatttattaaggtcagcttctgttgagttgatcatgtgcttttgacctttattctattaatatgatgtattacactgatttttgtttgaacacaatctcacgttcttcatataaatcccacttagtcatggtcaaaatgtttatatgtttatatactgcattcagtttgctagcattttgttgatgatttttatgtctatattcataagagatgttggtatgtagttttctttgtgatatctttgtgtggtttttggtatcaggtaatactggccttatagtattccctcctctcctggtttttgtagaagtgtttatgaaggattgatgtgaattctttttttgaacatttggtagaattcaccagttaagccatatgggtttggccttttctttgtgagaagttttttgattactaattcaatctcttcagttattataggcctgttccaattttccatttcttctagagtcagtttcagtagtagttatttatttatttttcctgagaacttgtccatttcatgtaggctatctaatttgttgactgcatttcttttagaatgaattctcttagttttcatccctctgagattgttctttcacctgcatttcaaaaggatgcttcttgctaggtaaaggattatagattgacagctcttttctttcagcactttatcagaattgttcctcttctttctgacctccatggtttcttctgagaaatctgtaataattcaaatcattcttctctatgctgtatgttgttttcctctggctattttcaagatttttttcattgtctttagtttttagcaatttgtttatgatctttctaggtattgatttctttgagataatcctgctggcagtctgctgagcttcttgcagtggtaagtttaggtcttttgctaaatataggaagttttcagccagtatttcttcaagtatttttcctacacaacaccgtttcttctcttcttctggaactctagttccagtattttagtattttctttttagtattttcttacagatccctgagcctctgcttatttttataatctttttttctcttcatgttttacattagataatctctattaatctaaattcacattcactcactattcctgctattacctccagtctgcaattgaagctatccagtgacattttaagttttattgtatctttattttcaaaatttttgtttttgctatcattccatttattttaagagtatttagccttacttcttggagcatggttaaaataggtactttaaattatttgtttgataattctggtatctatgctatcttggggttggtgtcttttgattgtctttttccttgcaaattgagagttttccagtttttcgtatgttgagtaattttggagtatgttctagacatcttgaatatttttattctgagtcttatttattatggagactgtttatttccttaagcagataatcgacctggttgcaaattctgacctgacttctctgggctatgtttctgactttggttcagttttcaaagcctttacagtgtcattttagtctgtttcttttgtgtgcaatctattgttcagtctgggacctgggcaatgatatcctaaagtgaaaatctgaaggccactggcatacttttagggtcggatccacaacgaagagcttaaatgtgagcccacatgttaatatgcccctttgtgatgtaactctcttgagcttccttggttccctgatgtcctctttttgctgtcctccagctagaaagcgaggaatttagttcctctgttctcctgcattactttacgtgactgtgtccaaggccaagcgcttgaaggtcagggagaaaaagaagcaatggaaattcgccccttattctgggactacaactcttgtgagaatcattcttctttctcagagttttaggtacctgctccgcctgtgctgctgcttcttggtactgagggattgtctgggggctggggtgggagggattggaaaaaaacaaagcaatacagataatttctctgaacattaggagttccttttttttttttttttttttcctttgttggccagaaaatgagggttctcttcaggttatttctgtccatacccagctagcacttttggatggtgagctgcctttgaatccagactgggtgatactggagggggaaaacagtggaaaattctctgctggtttggtgatactctgagttctagtctcatttctcaatctatttgttgttatttacttttcagagtcctctgattcttcatgttttctgtctagcttatatatttgcatttggtaggaaagatagggtgggagttcttactccatcttgcctggaactggagcctctatattagtctgtttatttattaatcaaatcctgcatagagtgggatttaccaagcctggtttcttgagatcctaggatgtattcataatatgtatcatggaattctcaaataatgcttatgataaaataagcttaaattttccttactttaaagcagaggctggcaaatgttttctgcacaggaccaaatagtaaatattttagtcttgtggtctcatagtctctgtcataacttcttaactctgctgtcatagtgtaaaagcaaccacgaacaatacataactagtaaagatagctatggtccaattaaactattgattgacactgaaatttgaatttcttatacttttcatgtgtcatgaattattatttttttgatttcttacaaccgtttagtaggtagtgggccagatttcgcccatgggccaaaatttactgaccactaatttatgtcatggatggctctatggccctgatcaacaactcctcttgattgaaattttctgtctgttctggagaaacaaagataggaaagcaagagaagttctagaaatcctatggaatgcttatggatacaacctgtaagccaaagtagcttctcagtcttcttttgaactccttaggtagggcacagagagagctcatagatgttttatcttaattcatctccatattactttgtaaggtaaatgctttcatcttcattttatggatcaagaaactgaggcacagagaggactgctagcatgtctcaagtcatgactaaactgggatttgtatccaggcctgtccagcaccaaagctgttgctcttcacactctaggatggcacaaatctcctttttttctgttttatcttgtctctgtacaaaaaagccatgtcaataatggtataggtcattgaaagccttatactttaagactgctgcgctctggtctggacttactcatgaattattgcataactctgggcaaacctcttcatttctcaaggtcttagtctccatgcctataaaataggggattggatccctattttacgtttatttctctgtcatggtagctgtgagagttttgtcagtgagcatcctaatcacagacagcgactttggaaagagatggtacaccttgtcattggagggctgtggggagttgtagagaacaagcttcatcctgggaccatgtgtgatggctgttgacatagagctttgtagctgtcaaggaaaatagagtaaacacactacttccttttgatcttcagtttttcgcagtatgctcctagatcatacttctcttgatttagtgatagccttataaattattgccactttctttgaacccttattggtataagtcggtgataaatgcttgagaaactgggccttgatgaagtactggtatacctcgtttggaatttgttctgaaaatggtaaagcatttcttaaaggctttgttataatatgaaaatgttcattgctttttttgttcattctataatttttttatcccttttacattgcatgtcttgattacatagttgatttgatattctctgaaatgtgatggaaaagaaaatgtaaacacaaaattaaaaagcagaggaatgaagacacattttgtgtgctgcttcgtgccagatagttttgtacatatccttgtacaaagtagtggtctcatttttaccacagtgagtaagcccctggtctctacctttaaggaacttagagtttgataggcttagtggttctcaactggcattaccctctcttgagagtatttagaaatctgtggagcagctgcaattgtcacaaatattgagggatgctgttggaatttagtgtgtgggattttatcacaatgaagaattatcccaccaaaaatgtttatagatctccttttgggaaacactgtgctgagtaaaatagtagtaatgataataaaaacacttgcatattgagcactgccattgtgttcagagaactctacagatacagtccatattctctgatatgtagctctaaattcagaaatctctaaaattgaagtgggttttttattaatccatttggtaaaatgtgacctgaattgatgtgagaacttttatttttttaaagctgagaactgtattttttatagctgtattgaagtatagtttacatatcaaaaaattcacctgttttaagtgtacaatttggtgatttttagtaaatttaaaaagctatatgtaactcttaccacaatccagttttataacattttcataaatgcctccccccccaaattctcttgaacctgtgtgagatgatttccagatgtttcactgaagaaatatggaagtgtttgattatggagtgctgctccagatccttcctgaatgctaggtattcattcattttgaattccaaatatacccggctgcagaagtttcttgtaagagattgtggactgtatgaacacatcccatccccacaataaccctggaaagtagatgctattattgttccttgttttgcagttcaggaaactgaggcatagcctttatacaaggctgaatggaatgtcacaagaaagtccagtgggggtccagaagagaaaatctgtgaccacttggcctgtaaccgaatttgcctatatttaaagatggaggaaataatctttttgttttgttttgtttttttagttgatactaaaggatatgcataaagtatttaaagtttaactcaagatccagtggatatgtgtggaccctcactacctagtctataactcaccacacctttcactcctttgggtgtccatccttatcctctgtccccctcccacagggatgaccactgtctaaaatttgtgcttatcaggccaggcacggtggctcacacccgtaatgccagcactgtgggaggccaaggcggatggatcacctgaggtcaggagttcaagaccaacctggctgacatgatgaaaccccatctctactaaaaatacagaaagtaaccaggcgtggtcgtgggcgcctgtagtcccagctacttgggaggctgaggcaggagaatcacttgaacccgggaggcagaggttgaagtgagctgagattgcaccactgcactccagcctgggtgacagcctgggtgagggcgagactctgtctcaaaaaaaaaaaaaaaaaaaaagtgcttatctttctttgattctctttagttttaccacatatgttttaattcctcagcaacactttaattttgcatatttttgaagtttatataaatggaattatactgagtatattcttctgtaacttagttttccctcaataatacttcttagatttatcggtaattcattagttttcattgttcttttgtagaatataccatgatctatctatactttgactgttggtggacatttgtgatgttttctttttttctaaaaagagataattcaaatggtgctatattgaatagtcctcctgaatttttcttgatacatatgtgctaaggattatgtaggcatgaaatttcagggtcctattgtgggtacatcttcagctttattggatgatgcctagttgttttccaaggggttatataaatttatactccctccaataatttatagatgctaaaatttttccaatctaatggttctaaaatgatatatcattctgacttgaatatgtatttctgtgatgactaatgagattgagcatcttttaatatagccatttagttttccctttttgtgaagtgtccgttgagtcttatgtccatttttctactggtttgtctttttttttgagacagtcttgctctgttgccgaggctggagtgcaatggcataatctcagctcatttcaaccactgcctcctgggttcaaatgattctcctgcctcagcctcctgagtagctgggattacaggtagttgccaccatacctggctaatttttgtatttttagtagatacagggtttccccatgttggccaggctggtctcgaactcctgacctcaagtgatctgcccaccccggcctcccaaagtgctgggatttgctgggttgtcttttgaatactcatttattaaacttctttatgtgctctggatactgatcctttgttgtttatacatgatagaaatgttttttccttctttgtggcttgtccttttgatctctttttggtgtctttggataaacagaagttcttaattttaatgtagctaatttatcattttccattaggagtttttttctttagtttttaaattagcgtttatggagtactttgtatatcctagacacctttctaagcaccttataaatatccattaatccttataacattagaggcaagtactgttgctatttccattttataggtaaggaaactgaggcacagaatgttaagtgactttttcaaggtcactcaggtagtaaatggtagagccaggacttgaaccaaagctgtttaaggaattcttaagaaaaccttttctaccatgataagatgtgcagatattcttatatgtcctctgaaacttttttgtttgtttgtttttgttttttgcctttagcatgtaggtcttcagttgctctctaatagatttttgtgtgtggtatgaggtaggggcccagtttaatttttttccatgtggattatcagtgtttcagcacagattacttaaagtctaaccctttccccacctctataatacatgccttataacaaatcaaatttccttatatgctcatatctatttctgggttcattgttttagtggtgaatttgtctctgtgtcagcactgtactgtattaattagtatgcctttataataattcttgatatcagtaagtcaagtccttccatcttgttctactttatcagcagattcttggaaagtttcctactctttaaaagcaagattgcaggataatttttgactgtaacacacacacacacacacgtacacacatgcatacacacattggggctttggaagatgatttgtcattgctattgtattgacttgtttcctgaaaatttagcagatataatttcatttgagtggcttgagctctatttatctgcatggccaaaatctcaaacacacatgatgtagtggcttgtagaaagcttttgattcttgttaaatggagaggagggagaaaggaaaggaaaatcagtctggtagattactagtgtcttctgtttaagttcagttgcgctgataattccagaaaatatactgaggaacttcaaaaggcatgtggaaccttgtgtagtatgatttatactaatcatagtatgtgtgtatgattgtataaggtgaaaaacaagataatgcatcttctatgattaagttgccttatttatcaagtaagaggtaactgtaccccgttggtcttaaatagctgatatgtggtttggtacttaatactgtctattggaggaattgaaatagaatacccagagatacccagagtctccactgggaatacttctgctccccaaatgtgatatcagagtaatatcaagtagaatgtggagtacacccacctattgaggcacaaactgccctctcccatgaccctttctctgtagaaagtattacttatactgtaaatagcagtcaaatttcaagtaacatcagttctctacatcttagccttttccaatctgggtggccaaagtgaagaatgattaggtactgaaaatttataaatgccgtgtctgagaatttctagacaatgggaagacacctccctaaggaaacctgtcagtctgaagtcttcccagctttcagagcatagcaagttcttaccatagcctggagaatatgtgatctgccagtgcctgctgccccttcacctcttactgacatcccccttctctctgcaagagtgactgccttgctgttcttcagaatgccaggcaccctttcaccccaagcatttgctctcctcttccttctgcctgtatgtgcttccctggatgggtgtttggtttactcctgattacctgggtctctgctcgaatgtcatcttctcagagaggtcctccctgaccaccctctcccataatagcacccacattcatctctgccagccctccctgagttcctacatggcacctgacacatattcactgtctgccctccctcgcttcccctccccacacactaggaagtcacttcctagaggaccagggactttgtctttttaactgctgtttcttccacacatgtgccacagcgtggcacatgggagccgcttgagagctgtttgctgagtgaaggaagctgttggctgaaaggagggcagagagggcctctggagcaggcccgtgccccaccagccctccccgagagctcctgcggcagcttgcttgcctctctgtcggaaacttgcaccatttaggcagctcttccatgagtattcttccattacatgctaagcaccttgagacaaaggtctgtcttaagttctttccctactgtcacccctgctgttttccttcagggctcggactgagcctggcacgctatttgctcatgctatttgtcttcagctatctgttaagaaggcatgcgggtagcagtcatcctccccaaggggagcagcagattaggcagcactgtaattccttaagcaaactcctggcccaactagcatttccattctgaattcctctatgtactgtctttgagtcttatggagacgataatcttggtgagaaaagggaccagccatattcactgcaggatctcccgtggatgcatagcatggtgccagaggcatggtaccccaactcagcacacactcactaataattcatcgctaaagttcactttggcctatgtgaaatttattattgttgatgtccaacattacactaaaattataagaatttatgtacaatctctgtacaggatctgtagggagcacacagtttttcattatgaaagaggcttcgttgctcatctcagctcctgtgctgttgaacaaaaggtgttagacacacacccattccctacttggggtattcacaaatgtcagacctcaaagtctcttctgagtaaattactgcctttgcttcatttaaaggtgcccttgtgaccttaaagaattcagccacctttcaaaatagagctgtatttctactcccacctcaccagagggtgagcctcaagtgtttgattacagaggagcgagaacttactctctaggattaatgtaataagagatgaagagcagacaacatagccactcaccgaaaaccatgtattcataaaaaataagccaagcccaaagtctggatttcagaatattttcattaataaatactttattgcaatgaacagcttaattgcttaatctctgtgtagttatggacatgtcttgtatacactgcctgggctgtatacactgtgtacactgctggctggatgggcttaggcagaagcaagggtcaaggcttttgccagtcttgcaaggcaggcttgcatcaggaattcctagagactgaggagttctcattgtaggtttctttctgactgaaagaagcatggtgcgggcagagcactaggctgcgggggttagaagaccttgcctcacgactctaaataagtcgtttaacctaattgagcctcagggtcctcccctaatggagacggacacatcaaggggctgtttggatcaaatgagatcatgtgactgtttgtggataatgaagttctgtggaaagaagatgggagggtagcattgcatactgtcttggtaagacctcagacttgcttagctgcagctcttcaccctcttacggacctgcagctgagcagctaagcgtgattggaaatgtcattcagctacgatgactggtattctttaaaatgaccactgacttcaagcaagaacttcacaccactggcattgatgctacattcaggaccattctttctcatttctagacagtgatttcatatattttcctctctcccgaaacctccagcaccttccagcctcactctcggccgatggctttacttcccatttccctgagaaaattcaagccgccaggagagaacttctcaaaagcgcccactgccacatccccctgcctactcttctgtccacagatactgctgcctcccctgttagcatgggtgaccatacacactccttgctaaggccagcttctttactcgcacaccaggttgcatccagccttgcctgttgaagtccatggcagtgccgttctcctgcctctctcctgctgtcagctttttcttctagactggatcttcccagtcaatacacacaaacatactcttgttaatatctcccacttagataaccctttattgattccttttcagtcattagctactaccccatttctcttttcctgtatggctaaatactttaaattattttccatattccctgctgcctattcctcctctcatattcctcttgaaactcatcgtcatcaggcttttgctccctccagcctaccaaatctgctgtcatcaagatcacaactggtcttcctgctgttaaatccagtggtcagtttccatccctcactgtacttgattccacatctagcatcctccctcgttaatgcactttcttctcatcttctcatggctcccaggataccacactttcctggtgttccccccacctcactgttgcttcctttcagtcttctttcctgattcttcctggccatttgttgtcttgttggagtgcctggaggagtctttaggccttctcctcctatttctatcagcactcgctccctcaatgatcttacccagtctggagtttcaaatccatccagaagctaacatctcatgcatctccagttgaggcctcccttccacactgcaagttctcacatccctctgcccttggagaggcacgccctgtcctacttaccctcccaagtgcttaccactgctcactggcttaggcgtacgtgttggccaggggttgtcatctctgtgctctccactagaatgtgggctccacaatggaggactccgtttactgttgtatccatagcacttagaagagtgcctggcacatagtaggtacttattcaatattttgttaaaggagtgaatgtgttaggtctccatatacagtggagattctagtaattcgctgtctcaggtcctgtctcaactctccctactagtattagggtgccctagcctttcagagatggtctttgtcttggaactcttactaaatctatttgataaaatatgattgtttctctagaactctgttgaattgataccaggcattcaactatgcagtattaaatgtattctttatcattgatttggggaggctatttgggatagtagaaagatctttgactttagagccagatacttctgagtttaaattcttgctctgctgctaaatagctacagagccttagtggaaacatacagtcttaggccttagttttctcatttgtaaagtgaaagatttggttcatagggctcttgggagaaattacatgctgaatatatgaaatgcatctagcataatctctggcatataacaggcattctatagtggtaactatgatgattatggtccttagctatacggataatcttaggattgcttgcaattcaaaactttttggaaaaaaaaatgtaattattccttttaaatactggccgttggtctttggttcagaacataattgtctaatttaacattgtttctgtggtaaaagttagatttgatttacatttcaacttacagagcctttttcaggaatttattctgcttcaaagatcaaggacttcctttcagtgaaacttaacgacagtgcttaggaatggaatgctctggaaggattgtcttctaattaatgagaaaggagcttattttgtgggggaggttctaaaatgcctttatatgtgcactgagcataattccaaagttatacagtaaacactccatgaatacttggttacttgtttttgctccagagatacttaactgaactcctctattgattgccctgaggtatagctatggaaagtagaggtgatgctactaaatacaaattcaacataggcttacaaatatcttagaggagcttttctggctttgaactgtaaacgtcaacggagctatattcatgataattatatcttgattgtatcttcttagggaaaggattgtcaatggtcctagctcaaaggaaattgaacaaagaagttaagatagcacatgcaaacatacacatccgtgtgtgcccaaacatacggactctctcacactgttaaataatgcatgagcaaaatattaagtgcaaggtacagtctaacgcatatcactctgcagtatgtggtaagtgccaaatgaacaggataaatttaagtactgtaatttcaaagaacgagtcattagcaaaggctaaaaatggtcaaggaaggcttcctggaaaaagtgagcttggagctgggcattgacagatgagtcacactgtgcctcatgatgcagtgtgcagaactggtccagccagggtcaagtggatggctctcaggccagtccacaccctcctctgggggaactagggcaagtctgctggctgcctcagtccttccctgtgaatgcagcccattattcctgaatcacatccttgtctgccattggtgattttgggtgcttcgtgggctttgggtcaaggcagggggttcttaagtggggagggcaggaaagggagtttaggatcacgtttgttgtggggaagtatctgaatgattcatttgctgtgcgtgtctgaatctttctttggagatgagttgatgagggcaagctttggctgtggatttctctctggtgatgtgatttgatttgatggataattatggaagagaaggaaaaggagattcaggattcagacacagaaaaacctgacaaacgattcacaaacacttttctccacccacagaaacccaaatacttagactgtgccttgtggcaggggcagtagggtggctggagagagctgtcacatgcactcacttgcccagctccatggattgtttacttggcagccatagctgtcgatagttggttatacgaatggggtgtgtttggccaggatcccgtagtctcacttaggcctttcataatagtcatgacaggttctctgtggtcagggaggctgggatagaggtgggggagctggaaaaggatgggccacctctgtcctgtccatagggtgacagccacagttctccataggaaccaaacctgcaggtgtgtcagttaaccatgaaccctaagcaggaaaataatatcgccttttttagacctccgcaatttgtgtctctgcataagacaatgagttttattgcaaaggcctagttacaaaaaagcgtgtcctgtgtgacgatgactgtgactgtcccaagctgttctgcttcggtaggacagtccaaaccagaaccaggaccaggcttgcttgacaaatcctctctaaaggaacaggtggtaggaaacttctgaccctcagcgattggactcaaaacattctctggaagtgccttagacattaccctggttttacaaatgagaaaactaccactctgtccatggactgatttgtttgaggttaccaaactcttcttgcctgtctctttctctctttacatgctgttaatttgttgtggactgccagatttacatctcttcccctgacctgttgctattctagacttgtatgtttcaaaagcatctcaagcttgccatgtgcaaaatggaatccagctctttctccaagcctggccactcccagcccttccagtcccagtggatggtgtcaagtccacctagggtgctgaccccacaagttgagcctgagaatgtcttggatttctttttatccctctaccatcgaaatcatcaacttttttggccctctctgcctctggtttgtttgtttgtttgtttatttatttatttatttatttatttatttatttatgttttagagattgggtctcattctgtcacccaggctggaatgcagtggcacgatcttggctcactgcagtctcgacctcctaggctcaagcgattctcccacctcagcctcctgagtagctgggactacaggcatgtgccaccatgcccagctaatttttgtattttttatagagacaaggcttcaccgtgttgcccaggctggtctcgaactcataagctgaagtgatccacccgcattggcctctcaaagtgctgggattacaggcgtgagccacagtgcccagccttctggatttattttgaacctctccacttatttctctttgtctctgctaccacctccctgatctaaaccaccaccatcctttgtgcctccagtctcttctccacacagtctccagagtggccttttaaaaacaaagctgagcatgttccccgtctcaacacccgtttatagaccatctttatatgaacagaactcaggctttgtgctggcgtccacaggctgtgtgtggtccctgtctctctcctgcaaccctgtccatcttccctcttgcccatggcacactggccatatcagcatcatttcagtgtcctttgaatgataaatatttgttgccacagagctttcaaacatagttttccacctgaaaacttctttttatccattagtttgtagcttagatgtcgcctctgttaggccttcatggattcctccatctaaaaagtcctcccatatttttctctatcattatggccagcttgttttcttgacagcatcatttatgattgtttattaattgatctggttattctctgtgccaactgctggcaggaaagggctgacatttgttttgcacccccgtaggagcgtccttttattcccagctggcttcctattactgtaccttcccctcactcctccacacttgtctccttgctgttcctcagccgtgccaggcttgctgtgccctggggcctttgtacttgctcggccttcttttaagaactttttttaaatactggtatctatgtggctgactctcattttctttagatctttactcagagtcaccttttcagtgacgctagctctggtcccagtgtctaaaactgcacctgcccctgacactccatactgaacttcttggctttatttttctcctttgtgcttctccctatccaccatatggcacattttacttatgccatttattgtctgtctccccagctagaatgacatctccatgagggcaaggagtttcttctgttctttcactgttgtatgtccagtatctcgaatagctctgggcacacaggcactctatacatggttgaatgaatgaatgaatgaatgatttcatgaacaaagtgtgtccagtcactggcacatagtgggctctccttatcctttttattgtggtgagatacagtgtatcattttaacaaattttaagagcacagttcaatgacattacatttgtattgttgtgtaaccatcaccactgtctgctccctacacttttctgaaatgaaggagtcgaggaataagcaagtaattgagtgagggactcttggcaaagcagttgtacagtgtcgatctcttgacttggaggcccagggggtcctttccattgcactgtgctctggaggaggaagggcaagaagatgagtctgagccccatctcagggtgctcgatgcatgcagcaaggaagctcagtgtttccacacgtttcaggttgcctctgttctaaatgacgagggtgctgccctgtctccccttccttctgccgtgcacacacctgctcacacaggcaccatgtgtacacatcccttcctctgcactggaggaagcacctttgcaatatttccagctcatgggatggtgtgaaagggatatgctcattctcctttgaacccttctcaccggatctccatcatgaggggactctctctgcctcccttggtgttctcatcagcacctcgtcaggtgagtattccattgatggcagggaagtgtttatttttaattctaaagtaaatcagattacatagaacacaaaatgttgtgttggatcaaaaccattgactatgaaattctcccagatggatgaaaggcgggggcttgttttcagcccttaaccacttcttctcacaagctggttaaattctacgagaagtccatccttgcgagcacttcgccatcacaggcccttcccttggggagctgtggcatctcccccacccccagcacactcacaccccccagcagacgggaacattctcatgctcactgtcactcacgtgtgtgctgtcccacgtgttctcactcatatgcactaattacacacacacacccaacctgcaggtttgcttttgacacgccaggaattacatgggagcagccagagagcccaaagtaagccttgagatgactttaacccctgtgaagcccacagggtaagacccctgctcagaccaacgtgacaggctcctgctcatcacgtgagttgccctggattcctcgatgacgttgcaatggtgtcttctcaacaaaacctcattgaggtcttgagacaggggcgcaggccaggcacatctaagtgttcgaggtcttctttgttgaattccacagcattatgtgtgcctccaggatgtgcctggcacatggttggcctggggtgtttggagaggactgggtgtaggccggaccctagaggagcttataggacagtgctggcggcagaggtgcccatacctgcgtcctgcatgatgttgcgagcgtgatacccgatctgtgcacaggaagctgcgggagcttggaggaaaagagaaccttgctctgtgggatgagaatgcaggtcaaggtcaggggagagttcagagaggcacttgccaacctgaaggtgtggagatgctgccgtgcatgggcaggaaggggagtggtggggcagagaagtcagggtgtggggtgggggcatggttccaggaagcttcctattttgtcttgtcagcagtagataggaactggattgaatcgggattatgctcacttctattgttagctctgatcatttgttgtttgacttcctgctttcccactagagatacgagtacatggcaagagatttctgaattcccacaccacaggtgtggccatggtgcacaacattgcaaggtccagggtcagtcgtcattttgctggtaaggaaggcataaactaacagcccagtagacaaatagcagtgtcccttcatgcggttgttactttgtgagagtaaagacatacaccaattggtttaatgtattcgggtagattttctactagtcgtgtccgtttaaaaaaatcaccagtcagttctctttatcggaaaaggtattagacacctgtagttgagcatgtgctgagatctggtgttttgttaattgcagtatttgatgatactggcaaaagtcactaagagaatcctcaaaacatcttgttagaaatgggaagaatattccttgactggcaaattttttttctgttcttaaaattaagcttataaatggctggaaaaattagttattttttccaggctttagttgggaagagatttttgtgtctggtgggaacgttccctctctccgttgatgcttgagaaagctacaagacgctgatggtgttggtggcagctttgccttatcggctgtcctggatgtcttggcctcagataagacacttaacccacagtgggagcatgctgctgcttttcaactgggaaacgttaccgtctgtttccatcacagtggcccatgacgaagttgaaagatgcctctgacatttgttatattataaaaatgccaagaatctcctaaagtttgactcataggtcagtttgctttcttaaaacaaaatggcaaccaatgaaagttttctggtgagtgttatcctccgaaattttaagtggatttaaataaagttcagtccgtggatgagaggattctcagtgaaattttcagtgtgcagaattactcgaggccattgagcagagtcattgctttctgtaatgttttcccataagaacacaagaatctccatcctccatcagactaatagtttttccagtccagcattttgccactgagaatggaattaagggagttgctgtgggaagaccccataacccttccagccatcacctcaaaaacgtaggagtgtgctttaaatatgtgtaactccccttaataagctattatggagcccttattcatatgattcttgaatttgtctaaattgcatttgcagcagtttttattttgggctgttaccatctggtggaacgtggcgggcagtctgaacagcagccagtcaggatttaccccatatccccaccaaaggatctcattcctttatccattcaattttcatgctgattcatttgattcactaagtagaattgataaatgcctacattgttcacctatgtgttgatttttggctctttgtaagggcattgctttaaatcatgttaccagtcagttcttattcttcctcttaatatgtaagaagtgcagcttcttcatattggttccaaaggcacaactcaccatattttctctttcattttctacaggggcaatcggagctgtagagcctctggttggtaacacccattgtagaatagtggggtgtgggcctcagagagactgagattatcgctggccccattgtttactggccatgtggtctggagtgctttgctgcatctccctgggcttggcttcctcatctgcgaggtgggggtaataggtggcttctcataaaattggactcactcagactccctcagttgcaagtgatagcccaatttcagtggacttctgtgaaaggtgcagctgacctcaggtggtgctcgattccagggggtgctggggaggagctgtctctttcttcatctctcagcaggggttgtctctgtttggctttctcctaggatgtggtggcgaaatagccactggcagccctggatttatatcttaccagtgtggcaacccagccaaaagagacagcatttttctaatagaaaaattagagaaatcccatggaggtatctaagtgcttggcatggggcacagtctgttctttcctgttgcggccaagggaggagagttttctggccctgcagtggccagaagatggagtcacttttacccaaaccacatggggaaaggattccccacagaaacggaggttctcaccaggggaagtggagggaggcatttacaacagtgtgagattacaacagtggccgccctggagatgtgagggctgtgaggcaatgcaggcagagctcctcaggcagaattctgtcatgcagaattcccagtagatggaatccagcctcttttttccttccctttactgcttaaggaatgcagcttctttagattgcttctaaaggcacttccttcaaacattaagttgattctacctttaatacttttataaacttttaattctatgtcctctcaacctggatgtgttttggaaagatttattttaagaggggggttggtatggcagggggaaatttcacttaatctgctttttgtcattcagtcaaaaattacgtatggagcctctgctgcatacagaacaccccaaagtctgtgggggatggaaaggaaccatgagaagcccctttcctggggtgtctgtggcccgttggaatgtgtggtgggtcaagtgtgtagattctgtggtataaggtggaatatgggcaagtgctgttagggaggtgggaagctggagggagcccagagtggagcagagccccatccagctgggacaatacaggaggactagatggagggggtggtatctgagccaggcctgaggaggggtgtggttttataggcatagctgttgggggcagagtggggtggaaggaggagtggcccagcagaggtgagggagagggagctgacagcttcattcttgatgctcactttatgccaggctctgggcatttggacaagtaacagttcattgctctattcaaggaagaaccccatcaagtcatgggtgcccagccgaaagtctttaaggggtcgagtgagggcgtggaggaggcagccttcatctttcctgaaaggcacagagatgggatggtgaggatgaatctgtgaaatgatgatgattcctgggtttctggaggcggaggtctacaaggagggtggtgcaatggagccaggtggtggaagaccttgaatgccagagtaaggagtttggtggagattgttgaggcactagttcttcagggaaggcctcatgggtgtgtgttctgtgcagttgcccagggccccatgctcagcttaatgctatggtattgtcttcttgaaattcttaatacttttgaaacaaggggtcctgcattttcattttgcactggacttgcaaatcaaagcatgcttgggggatgatgtactttagaacagagctgtgctttagagaagaggttgggccatagttgggaggctgtttgcatccttttgaggaagggggagtaaagggcccagacgaggatgggtatgctggggatggagggaattcctctgacagcctgtggccaggcccgagcagcaggcggaggaggagccgccatcagctcttgactgggggacattcttggagctgtcctctaagtcaggcctgcaggtgacttccagggatagcgttggtgttccaaacggcaattgagaagactgtcttaatatttttactctcaacagtaagctaaagctgacattggcagtctcattcaacgaatgtgaaataaccagaaaagacattccaaggcgttctggaatcaaacagatggacggagcaaacatgttaaaaacagtaaatcacaacttgaacttcagctaatcataattgcatttctctttccttatttaattttgaaacatcttcctaagtagttttttattttggttgcttttacttaagagaccttgttattatagggcaccccagttaaagatgcctcatatatgacatctgaaccaaaaaaccttatcatttaggacatgatatcctttctgaggtttgagaagtggctattttgtctcttacaaagatttgtagggaatttactgagggaattgttgagggactagtgagcaattcttgttcacatagaaatgaacaaaactgcatttacccagtgattttcaaaaacatactcccagtaaatcaaggttgctctgaactgaacttagggtctcaaccagctgcagaccagttacatcttagcaagcagggctttgagtggtgcagtgggcagagtgtgtggctctgacctatcaggtgtgatcccctcctactgtgcactgtttcctgtctggcacagacacaggcaaagcacttttgctgaaaggacagaaagactcaaggtgaaggcagtgccatgcaggccccggatgctgtgctgagtgtcttggaactgaggaagccgctgatggccagtggggccagggcagggcttgcgaaaagattcaaggcttcattccagtcacatggacagactggtactgcttttcacattcttatcaaaaagggctgcaggcaggtacaaagaccactgcagcctttcctgtcctcatggcattgccctacaactggccacctaaaatgaccttctctgctcctgcatccttttaggaatgggtaacttggtaccattcagatgtgccatgctgaaaaaatgagagtgctttcttttgagggagttgtggaggaatacatgatgtcctatatgggaggcccataaggttagtgaggtaaaaaaaagaatcaagagtttttcttgctctgctcattcacccatagtgatggagagatttgatttcatctggatgctcgtgttccactgacagtgagtactgctcagccagtgctcgccgccaggtagttaggtgtgtcttttacaatgtttagcacagcgaatagagaaagtgcctggcagatgcttggccatctcctctgcatctcccatcgtaccaagtatcttgccttgtgcacagtaggtgcttgtctgtggggcaaatagatacatttgcagttgaagtaatcctgtttctctgcctgaagtaagagacattcaccatctgtagagtgggaattgtgacttcctctagatgcagggacagttttgtaataaagcatcctcataacctcacttggccctttttggcacaaagacctgtgaaggcggagaccatgacctattttgctcagcatttatttcccagtgcaaatactcagtatttgttgaatgaataaacaaatgggatacacctgtctttcttaaattgcagaagttcattgcttaaagtagccatgtatgtcttcatcaaagtttcttcagttctcaaaatcttctcatatatgtctgtgcatacacacactcactcaacccagcagttggcatacaatggccatttggtatttgttttgcaaaagaagttagtaagtggcagtaggtaaagaaaagggcactgactgggaggtgaaagatctggacccaagtccaggtttggccacctaagcaatctggagaccttgttaaggggctgggtatcctgtctcgcccagtcagaatcttgctgtctaaatggggctaatcactgcatatcttgaaggtggtttatccagctcacaagaaagaattgatgtgcagcgcttgtcaaagttaagccttgtacatgtgtgaggactttgttcttgtcaccgatatatgctcggatccccatgtttgatgtgtggctaatgtgtatgcaccttctccctagtccaccctgagagctgagggtgtcattttacctaaataaagaaatacattgttaatgtagaaaatttagaattcacagaaaattgtaagtaacaacaattacctgcagactgtagcccagagataaccactgttaatcttgtgggatgtttctttttgtacctctcctaggcaggtacattcacatcacacacacacaaagacacggtattacttcagtcacataaccattatttttgtatcaaatttacccaagtagataacccattccaggaaaagaaagagacttaactttgttgttctgttactttctcagggcctagtgcactatgagaccgagcaggtatttgttaaatacttaatggctttctggaacatcagggctgacaagattctgagttataatctaatgttctcagctgaagtgcaggagaatgaaggcctatggagagaagcaggcccagggtcctagggctggatgtagctgagctagaactcagaaatgtgctgttgtcttgcccacgtctactctctactaataagttaagaggcacatgcaagaaggcccatctggttggtgcttctagcagagaagctgattcatgcttaattttgaccacatctctaggtttgtggttactgctcagaatcaggatagcatctgggtatctcgaagctgctgtctccagtggaggctttggactgatctcacaaagttatgctgatttctacatcagcctacatctggggtccttctcctggttatcattgtttgtactgtatgcacagatcccacgcccttacttaataatccagccttggtggaagtatattctcctgtgtttttgttggaatataccaaccctgtattgccctgccctgcctttcgagcatcgtgaaaagaagtccttctttctcttggtggttcttgcctcatgctctcaccctccctttttgtggtgtcttactgagccagttgttcattccccagcaaacatttcatgtttacagtcctcaactaggctatactgtggaagattcagcagatgtgcaagcccagcctttcaggatctgagtcgagagagagaggggacattatatagagaaattatagctcagtttataaagtggccagtgacccaggagagcggcagagcacaggctgtggatcctgggtggcaggaggcctttgtcatggttattgggggtatagggagctgggcaggcagggatttgaaaagaggggcattagagcttgacttggaaagggggactgggatgtgaacatttggagattgcaggagaaagcattcctggcagagcaacaagtagtagatgagaagggtcacaggtggatccctaggtgggggtagctaaggattctcaggatctggttgctcaatagcagcaagttgagttctgcacctctgcaggccatgacctgggaaaacatcacctcccaagccccccactgcctttacttgtccaatgctattggtgcaagtagcctggcaagttgatacaaccagttttcctttgggacaagggacttggtgaggggatctgtggactcctaagagccttccagtggattccaggtgatttgggaacttcctaaaattgcacagatgattttgtgtacatgtgcacctttcccccacaactttcaaagatctctgttacccttgaaagtgtaggaggaagagggtcggcatgtggattaattttaaaaccatatttaaaaaactctcaaatcatgtgaagtttgtagtggaaagctccattcagtttgaaagccttcaccattctcaggcacagctcactgatctccttagtctgtgcacccctgatgggcaagattatgtctcatccctgcccagaacttggcctcagaatcttatttgtgatgtttgttcagggaataaaatagctttgatgtggatataaatttgcatgtgtgctgacttgcaatagagtggattttttttttaattgctacctctaggatcctaaggctgactttatgtggaggagacatttccaatgtccgtcttcctgcctggtccctacctgaccctccttattaagcacagggataagccttggcatgtcctgccagcaagctgagggctggggctgtctggcctgtacttgccaaatgtagtctgagctgtcttctctctaaaggactcttcagccccatgacccccaagtatagagccagacccaaatgtgcctcttcacatgttccaaggtgggcatgcttgggaacctcatccagcccctccttgacctgaggggtctgcagcagcagcccatgctcatcttaggcagtataaggactcctgtggctgcagaaccacgaggtgggactctcctcaggggctgcttcttggtgaatctgcactctatttataatcaaaagctctgccagatggacgtgaggtgcccagcagagggtaggaacactggcagctgccttggcattttgttaagtaggtatgcaagttgctggcccatcagagagctgtaaggtgctggaatgacagagccatttgttttcccttgtgacatggtctgttttataacgtggtgggtgagatcaagggagaagagtgggccccttcatagtttttcaaagtccttttttccttttttagaaaagttcaaagaggacattgactttctacagtcacaagcatcagcctgtcttggagagacagcagctgtggcatgtagtattttaaggtgatgagccaagtcagacaagtcctgatataggtggggtctggacatcctgagtgatcattctcatctaccactcctctatctgggccattctcattcattcagtagctcatggattgtctctctatctgggccgttctctttcattcagtagctcatggattgtctgtctatctgggccattctcattcattcagtagctgatggattgtctaatatgtgctgaggagagagggaatagatgcacatggatcctaccctcagcaagctttctgaacaggaggcagtggacacaaacagctgtaattagcacaaggtagcatgaagcattgtaagaaacttggagatgtgcgctggcatggggctggggtcagaggtggttggattgatgttcctgattcctcccttctgggatgctcgtgttttatttattttatctaaaacctgcagaacctttaccacttgtttctacctttaacatcttattgcatttatagcctctctgttcatctgtctgtccatccatccctccatccattcaccatctaacatttaccatcctaagacaggatgcagaaggaaggaagactcagtgcctgctctcagggagctcacctttgattgcttccttatggtcccatttgtgttgggggttttgttccccagcttaactgtaagttccttgaaggtcaaagactgtcttcttcagtgttcttggaagttgaaaaatctgtttggtcagtggattgctgcagctgtcgtcttgggtgtatgtgcttaacaaaaggcttaagagtgtgtgtctgcagggcacaccagccttgctgtttgcagtgctgcacagatgactctattagagtcttttggttctgatttggaaatctagagtggtgggagggtgggaagggaggtggggaaaaatacaatgtctcaatagaccaagttcccaaaagtgtatctgcacttgaggctttcctgaagaatgaaaagcttaattcgtgccttttctttatgctacttgttcttttgtctttttttttttttttaaggaaaagatgtgtcaatttcagttgcctaattcatttttaatatgggtcagagctgccatattcacacgctttgtctcatcacacctaggcttctgttgaaatgcttgcttcacaaatgaagtttaattaatagaaatagggaagtgaacacagggctgatgaatctggggagacatgacttggtgcctgcccagagaggtccctgggtcagattcctcccgagcctgttgtcagaggcagattcttacttagggagccaggatactgggagtcaggctggggcattcatcaacaatgcatagcatagatttgcttcttagcagatgtggctggcctatttacagttagaagaattgtcattgttttagaaaactttttttgaccaaaaaataaaataaccaccaacaaaaaacccagactcttgagttgaggccaggtttgaatctcaaagcaggttgacctattttcattacagcattatcaaaacttgtgattctacctccctaacatgcttttcctggtgtcacatgaattgaacacctgattcaagcaggagagagagagtgaagaccttgtccttgtctggggcggccctgtttcccactgtgctgtggtctgaacctctttgagtaatgcctcccagagctcacctgctaatgactgtgctccacctggggaggggctattgggaggggctggtccacgcagacagggctgtacctttcacgaagtgctttcacatcccctgtttgaccttgacaacttcccagtaagggaggcagtgcctgcagtgttatccttggtccacaggggaggaaactgaagctcacacaggcaggcagggggaaggcctgggagagaactttcaacactggcataccacggggatttgtgagagcacctgcctggagtccctgcctccgagaacttcgacttctttccagatcttctgctctcttatttgatttaagtagatccaaatatggttcaggaacaaagcaggccccaaactgtgtataggatatgtgggtaatgggccagaaagctcactcctctggaaaatgttggaaagtgacctctcctgagcatcccagtgacatggctggatgccctgttgagatatgagagaaggggctgggggacaaacccatggcaagggcactagctgaaggaattcatgcagaggagaggagagggcttttccactgacgtttccttgcctctattctgtgtgtgtgtgtgtgtgtgtgtgtgtgtgtgtgtgtgtgtgtgcattcctccttggaagatgagagcttctggtctcaaggggccatgccctgtttctcagcagcctcctcatctactctcttggttttcctcattctcttcgaggtaacaagtcctcacctatttttttttttgtggcaccctacagtgtctgcagtgataagagcaggtatctttaaaaaatcaaagccaaattaatctactttggttttttaaagtccccatggtccacaaaaatatttacagggactggagattatctgctagtattctaaaactaacagtaacaacgattctttacatttttatagagagcttcaaacattttagactatctttacttctgttttcctgttattcctagtacctctccagattagacaagatgatattaaatatttccatcttacagatgagcaaattcagacttagagacgataaggtactagccccctggaaaacaactgcactgaacctaggtcctttatttctgaacaagacaggcatcgtgttgaacttcatgaagaagataatctaataattgaaaatacatcaaatacaaggacaaataagagacgctgggggggtaatgtgggagaaacctaaccttgtctgagggtaaaggcagtgtgtaggtgagacatggatgctgagttggcctttgctgggtgaagagagtcaggaagattgtccagggcgtgatgtgttcctggaaccgtggggccccatctcagtgggccttgcaagccaggatgagtgctttggtttgtttttaaagctgtgagaagccactaaagggttttaagcagaggactgatgtgggttttagaaagactgctgtggctattaggcagaaacatgtggggaggggcaagaacaaaactggagagccagagcaggcagctgttagagttattcagggaaatgttcgtgctgtagactctggggtgactgaagtgggaagattcgagaactattggggtgtagaagggacagcagctagggattatttggttgtggtagaggacaacaggtaatagagactcaggattttggcctggatgtaatggggccattttctgagttaggtaactttttacattacagggtcttctctgggacctgcgggggcctgttttgggcaggagggcaggagcatggactcattttgggacatgctgagtttgaaatgcttttaaagtatgttatgtggaaacttcaggcaggaatggggacaggtggttctggagctccaaagagagaagtgggctggaggtgcaaattccagattcattgccacaaagtgaataactggaatagtggacaggaattagaccaccaaattctgtgattctttcgtctttcccgtacttcttgaggggatttataaactcaagctcaaaataggaacctgagctttaagagagatatagccacgtttggagttggtttaacaaaggctgttctgcgggtcccagagaagaccctgtaatgtaaaaggagaatctggtaggtaattggaaccaacaaatatacttaatgttatatcccagtgatggtgatctcagaactcacggttggttgtacgaatgctggttcctggtctctgtagaattgcttccttatggctgcacattccatcaagtggttctgcccaaatttactcaattagatcttggtggtgcatttcacaataagaaataattctgaaatacactcataatggtttcaaattttagatgaattctttggattaagacctaggggtatttccttggttgtagagaacacacacttttatgactccttgttatgaaggcaacagactgtgtaaaagaactctggagttgttggggcaagagctatgtggtgtttctccctgaagccctcagagggttgtcctcctcggatttcaagggacccgctctgtgaggcacactggagtctcaggggcaagctctttttcactgactcactcaccagtgtttgctgagtgtgtctcatgccttctttcttgcttgcccctggaacatgcacaggactcagacccagccctgcttgtggcctggggctggtagatctcatgcaggtaatcacggctgaggatgagctctgctttgtgtgagttctggatgaagtctgggggagtttggagacgggagatgctccttctgcctgggggagtagagaaatgcttcccagaggttatggaaggaaattggatttgtggaggtgactgacagatctgtgccccttgtgtcagtgtctctagctgcgacagacacatgggtcagcaggcgacccttgttttccctgagagcagcaaaggccctggtgaggatgtgtccagcactacaggactggctagctgctttcttttttacctttcagttttcaaggtatgaatttttaaccagatactttctaaccttaaagtgatttggtactcccaaggaatcattctgaaagttaggaaatttatttgtgattcattgagttgaactatcaataactgtaacagattccgatctcctttgtggaaaaaaaaagtaactgtcttctcaagtacaagaatgagagaaagggtcttgattaccattttgtcctgttcaccttttttggagaacacctttaatttcttggccacaccgtgctcgtcttcattttgcacagcaccactgttgtaactcctaaaacttacgcatcacggcagatgtgtgattctttcattctttagatctgtagttttcccttatacagaagttagtgtcttctcttccaatgtatttaaacctttaatgaatatttcatcaaatgaacttcatgtcttgtatttcattattaatgttgtttatgagaccctatcctcattagcataacttacaaactaagaggaagaatgatattttaggacagtggttggtgagagaatagttgcgcatccttctacacgtgtcaaatgtgggcctttagcgagcctgcaggaaaagctgggatgctgagtatgtgtctcgcctggggtgacagatggggtgttcatgttctgtgagctctcagccgtcccgagtgtgtggctgtccctgcagcatttggacgaactcccgccaagaggaagcctgggcatgggggtgctgtgaggcaggactgagtgtatgaatcaaggtcggccttgtcctagctgggtgacataagccaaaccccttgccgactcttcagggtcattttgatcttcccgccacccagatgtcccctggttcactgatgaccccgataactaatgtgtcattttcctctatgtgcttttcttttagagacaacgtctccttctgttgcccaggctggagtgcagtggtgcagtcatggcttactgcagccttgaactcctggcctcgagtgatcctcccttctcaacctcccaaagcactgggattacaggcatgtgccattgtgcctggccttgttttggcaaaaccatatggatgtcccatctaacactccagcctctcatttcaagggcccttttcccctttggccatccacttccacttgcataccctgggcctcatggtttgggtggctgtttcagctcctgaacctctaacttagtgtgctcctcaccagccttgcccttctctctggcctgcctgctcagcatcacccagggcctgttttccctgcagacctgggctctcctccttggccaacttagatgctagacctttcacctcacctcctcaaatccctttggtccttttcatcacttctgtgcaggacatcccagccctggatggatccagctagtggtcctggccctgcctggccatccagcctcagctcatgccactgcccctgcatccactactgttctgcttcatgagctgccttctgttgctctaaggagtcaactccttcccaccttggagcttctagaccgtgtcctctccccagatggctcctccctcacttcgtctattactttaagctccacatcatcatttgtttcctaggggagcctcctctgactgcctggttgaggtcaggcttgtcgtccagcctatacttaggattgtcacttactgtttgtgtgcttatctgttcaacacctggcccagggttgtatagggcagacctagtttcagaccttctgttccttcatgcccatgaaatgtcccagaaatcctattgccttggcatccaaatgccattgcccagactgtctcctatagtcagaaacagctcagaaagcttttatcagcatgagtgtcctagtttttggttcacaaaacaactgtggtcatcacagttctaattcctgttggttggttggagagtcagtacagagtattagctttgggccagattccttgagttaaatccttgccacttataactaggtgagcctgggcggccgggcaccctctcgtttcctcatgtagaaggtgatcatggtgcccacatcctggcattgccgagaggatcgagtgagcgggcataggtacttctctacactgagaagcactgagcacttggtgagcatccggaaacatctgctgctgttagtgtgggctgagctctgtccgctgtgggctacagaaggccctactgcctgtcctgcatttttctcttatgtatgggctttcagtaaacatgtttggattgaaatacacatttgaggaggcactggacccagacctttgagcctgtgattccaaaccctttcctcctgtgcagttgcagctcacttcccacatcactcagtcctgcctctaagcgacactacactgtcaccttccttcatcatcactgttggcgctttcacataagcaagggccccatgtatttttctcttattctctctgtctggaatactctaattctttccttgaatccaatgttctgttcacctcctcctttatatttttaattttttgttttatttatttatttagttttgagacagagtctcactctgttgccaaggctggaatgcagtggcatgaccttggctcactgtgacctccgcctcctgggttcaagtgattctcctgcttcagcctcccgagtagctgggactacaggcatgcaccaccacgccccgctaattttttgaatttttagtagagacggagttttgccatgttgcccaggctggtcttgaactcctgagctcaggcaattcgcccaccttggtgtcccaaagtgctgggattacaggggtgagccaccacacccagcccacctcctcttttaataccagcttcacaaacatccttcaggatatgtctccggactctgagcctgtgtgttgctctctgtccactcaatgctgtgtcgatttgccctagtaattggcaattataattctaagattataaactacagtatcaaaggtaagagcaatgtttcctctcccaggaactacacaaagcgtagaagaactcagtatttcctaggccttcaggaaaagcttgttgactaaaagaaataaccagttgacctggttttggtgtccgtttatttttgcgtggatatgaggtgtaccctgggatccttgttaaatctcatgttactcagcttgttttgtcaccagtgttgggcaaaactgggtgacaggctctccaccttctctgcccctttcttttctttccctgcttttccaggaacaccttgattcttctgtacgctagggtgtcatttctctcgttccttcagcagttcaatgagagttcctgagcactgcctacagtgtgacaggtgctcatctgagcgtgaggagcagcagtgaaccaaataggcagggctcctgttctggtggagctatgttctagtgggaagagaggtgataaaggaatatgtccacgacataggtggtgcttcgattctagcagggaagacttatgttgattggccaggaaagacgtctttaatgaggtgccatgtaggcagggatctgaaagaagtgaagggagcaagctgtgaggatagccagggcagaggggatgggcacccagcctggctgagagtgtgtgtgtgtgggggaaggagatgtttttaattggaatggagtaggggtgaaaggaggagctggaggcatcagaacatagaaggccttctaggaaccccctaaaagggccttggatgttactccgaattagatggagagctgtttgaaggtttttgggagcaggggacattatctgatttgtctaatgtcaccttaggtctctcatgagcttaaggaaatattaactcattcataggaggagggaagtaacttctgttttaaggagggacacttgcctaattcctctttgagtaaggcctaatctgtcagagtcgtggttggactgtgttctgaactgtagcatcccagggcctgaccctagttctgtttttttttttttagatggagttttgctcttgttgcccaggctggagtgcaatggcacaacctcagctcactgcaacctccgcctcctgggttcaagcgattctcctgcctcagcctcccaggtgcctgccaccacgcccagctaattttttgtatttttagtagagacggggttttgccatgttggcccggttggtcttgaactcctgacctcaggtgatctgtccgcctcagcctctcaaagtgctgggattacaggtgtgagccactgcgcctggccaatcctagttcttttactctcttgcttttgctcagcctgtaagtaggagtaggaagtttcaaaagttacaataattaacatattcacgcctttttcacggtctgggggagctaaagcaggtgcaggataaatgaaggaactgaaccagctaggaccaaaatcagtaatttgaaccaaacttgatagctactgttttgaaactgtcattcctacctataggtagataagggcaagagattataaaatctgatggccacgaatctaattttatgagacagtgtaatgataaaaggaatgagggaggctgataaatacagatctgtatgtcttccagttttagccagcttgtcttgtttctgagtttcttgagtttcttccctgggaattgttttaggcccaaatggtaagcaaaaggaatatggtgtaagtggaattaaataactccccccagcacctcctactttctctcctcagatgtgtgagtggtaaatactttggaagaaatacaccccaagcctggtgtgttcactctgctcccaaaggtgcttgggcagttggtggtgatgggagtgttggttgattgtagctctgtatatgagggtgtctgaggattgtaaaattatcaggaaatccctcttggtgttgaagtcatgagcaggtgcaggagaggtgaaaggaaagggcagtgggtattcttccccctcaaagtgtgggaagagcagtgctccaaggccacccaaggagctgggattttttccttctaagctggttttccctttctccccactcccaactagcacgtgggcagaaggaagtgctttatctgcctgctacagggctgggaaatgtggcccgtgtactgcctcagtgcttgggtcaccagcggagatggctgcagtcccagccagctctgcaggagcttcagtcagaaacgctgatgttaggatgcattcttcagggagctgcagcttttcttagaaggtggaaaaagagaaagaagtgagtaaggtgaagtcttagaagaaggaacaacagaaaccaagttcagtgacagcccaccaggcctggcagagtctgacaaggagtctgtgaggtagggagtgtgcacgtgtgtccgtgtgtgtaaaggctaatggaatgggagacgcccttgaacagaaaggctttcacccataagtgtgaagtctggttcgtcttagcgacaaaagttagaaaaccactttcagacaataattgtattattttacagcattcgaagcaacctgagttggtctcaaaggtggctccctcaggccttacctgaggatggggacagagttgctcaaatgctttgggattactgagactagagtcaggataagctcgatcccaggttcctcaggccatgcttttccactagccaattcagtcccttcagcaagtgtttgtcgagcacttactagatagcaggtactgctcttggcactagagatatttggtgaaaaggtcagcctggagcttccattctactcaggagacaaatgagtaaatacaggaggtgatttagagagcacctgcctcctgtaggaaagaaagggaggttatgcaacagcacctggtaagggtggtcagggaaggccatgtggggctctgggacagaattttccaggcggaaggaagatacagaggcttcaaggcagaaagaaacatcattgtggagtaatggcaggtggctgatcccactctctgcatgcagaaaagagcagcagccttcttgaagccttcttacctttctcacgttagtacaattccacacccttgtgtgtatgtggcagccactgtcataggcatcagggatcctgcttttcttccccttgaccaagatgtgaagatttgtgatcagagcatcagaaataaagtcccttgagacttgcagattgaggaaaaaatgacaggagtcacccagatatgaaaatcagatcttgaattcgtctattgatcaggcattaggcatggtgggagttcagtccgtttcagctttaatgtcctgttgttttgctattgatttctttcctcaggtttcaattggtattttttccatgttgtctatacattggtcatctattttagtgatgctaattgtttagctattaaaatggtgcattagtcccacacaactcttataaacagctgtgtagtaaggagtataatctttgtatctgtagtcccccttagggttaataattaggtttttgacagccagctcagccggcttgttttcacagtgccctgtttcccactggagaatgcaaggatgcagtcacgggaggaccaggtggacagcatttggaggatttgggtggatctaagaatattttcatttggaagaacaggatggacaccagaggccaaaccaaggagtagaggaaaacatggcacctttcccccatcccacccctggaactttcacccacagtatagggttgccttgaagctctggattaccatggagctttcaatgagtaggaggagacatccatttgtcctctgtctccagctggccccgggaactattcaacatctgggattgcttcctgcggtgccccctgacccaactcaccagagtctaccgactctagacccactgttgtcctgggcccctgcctgactcttttacccactccaggatgaccctggtttctactgacacctgcctgacctaactcggtttgtctagaatgcagttgaagttgcagcaagggagatgaggaagggtaagaattggtgaaaaaaattacaaaggtttttcatggttcctaccctcgatgagtttacagtctagtcttcatgaggacatgtgctcatttgatcataaggcattttgtgacatgtgcctggaggtgattcagacagatgggcagggcaggagggaatgctggggtgtgtatagcaaaatgtgttattaaattatggcatctgttgtcaacaaccggtttagaccttcttgatctcctggggtttcttttcagttacagaattctgtcatcattacagaaacaaggcttagccacttactgctttaaataccaaaaagagatggcgaataagattgggatccatggggctttgagaacctagtagcgtgtgtgctgtatcacagttctcttctggctgatactggagagggccatgcaatgctggggacggacagctgtactagggagtctggattcgaattctggacatccctaggctcactgtgtgaccttcatcccccctccccccactccctgtaccctttgagtgcccctgccttcttactctgcatgtgtgtgcatgtgcatgtgtacccatgagtgtgaggaaggataactccagtgttgggggagagtctgccaggagataggtgccctgagtagtggtcttctcttgggcacttaccgactgtgtcattttggaaaatggccccccccaaaagatttccacatcctaatctcttgaacctgtgagtatgttaccttacatggcaaaagggatgttgcagatgtgattaacttcagaatcttgagatggaaagattactctggatttagatgggcctacccaatccttacaagagggaggcaagagttagccggagaaggagctgcagtgatggaagcgcagaagtcaagagtgatgtaaccacgagccaaggaatgtgggcagccttagaagctggaaaaggcaaggaaacaggttcagccctagagcctccagaggagcacagtcctgctgacatcctaattttagttcagcaagacccatttctgccatctgaccttcagaactgtaagatactaagtttgtgttgttttaagctactaaattatagtaacttgttatagaagcaatgggaaacatacatcaattattcctctggatattagttgcttcagctctaaaatggggacacaaaatgttttctgcctgaaggctgagaactggaccatgtgacttttggcattccttcaagttctagatttcatgagagagaaaatcgacctgaaaatgcattaaatgtttaaaaacatagggaagaaagaaatatacaattatttaatgtctgtgtatgtcatttaattcttacaaccacctgagagagattttataattattattttcttttagtcattcaagtatttgagtgcctatatgtgccagatggtgttctaggtgttagaaataaagcagtgaacaagaccaataaaaatctcctgtctttttgaagcttatctttagggagacagatgagaaaccataagcataattgctaagtgaatcatcagctaggttggcaattgatagctgggatggaagaaaattagagcaggttgatgggagcatgttactgactaggattgcaggagctcagagggtgagcagtttgctcaagaccacagcaccaggaggtagtggagtggggatgaaacccaaaatctgttggaatccagaggcctggtctgatccttttctcaggctagtagaaggctctgcctgactttgcctatttggattcccccactttactgagggagaggagtccccactgccagctgttgttaggacaattgctatcatcctgggtttcatatttttagctcctttcccatctctctaataagtaaatgccagagggctagggctaggctgatgctgggaatgagacgaggaacacagacggcacaggtcgcttcatgagttccagaggcttgtacaggagacacatgggccggccactgtttcctgtctctctgagggagctgcaactccagcctttcatctcacaactcaagttgcttttgctgcagctgaggcctgaatgtgcatttgtaactctggggaaaagggtgttcagttatcaacaattactattaggttggtgcaaaagtaactgcagattttgccactacaagtaactgtaaaaactgcaattacttttgcgcctacctgatatttttatgttgcatggccttttcctggcagtttgatgtttatcatttcctgtcattgaggaatgtgtttttctaggacagtatgaaggctttcaggatctttagagggaagctctaaaatgtgcttctctctccattaggttggctcatcagtcagattctgatttgaaaatgaagggtgcttggcagtaagaatagtggaagtaaattttcaatattatacattaacaagtcataactaataacttttatgggttcttcccatctcagatttcagagaatatttttgggttgtgttctattgatgagggcttaaagaaatgccttgttctggctgggcatggtggctcaggcttgtaatcccagcactttaggaggcccaggagggcagatcacttgaggccaggagcttgagaccagcctaaccaacatggcacaacaccgtctctactaaaaaaaaaaaaacccaaaaattagtttgggcatggtggctcatgcctgaaatcccagctactcgggaggctgaggcaggagaatcgcttgaacccaggaggcagaggtcgtagtgaactgagattgcaccactgcactccaacctgggcaacagagtgagaatctcatctccagaaaaaaaaaaaaaaagaaaaccaaagcaaagccttgtcctgttgtgcttggtttgaaactgccattccctttagtttctgcttactgctacttctacacaaggtcaagagaaagcctggcttcagaagaattacatagtcaacccctggggctagctagctgcagaagaacttgaacttttggttaattaatggaggctgggccatagctggcaaagcgggatgtgcccatgcctgggtgttgagagactgggtcttgacatggctctgcaactgtccatgtcatcttggaagatctttctgagttgggacagctgagaaacttcatgccatttgacagttttcttgaggtcatgagcaaattaaccagtcaaggaagtaaataagtaagttttggtggaacaagtttgtatgttattggtgtgccttttttttttttaataccataggtgtgttcctgatgaaaagggtgtgaataaatggaatttaaaatagttttccaatgaacggaatctttcacatgttaatatatcagggtcttctgcagtgacagctttgcctgaatttcatttttcacattagcttaaaaatattttaaagtaaaacatgttaattttgaaacatataggaaccagataaaggcaatatgttttttataaaatggaatcatatcctatcattggacttttggctgttttcctcttttaaccactataaaccatgttgcattgagcatcttggggtagcaaaatcacagattcctgattatttctttagaataaactcttagccttgaaattgctgcattgaagcatatacaggattttttttatatgagtcgcaaagttatttgctttgcttttgctttttgaaagagataaaagcttagacatcttgacattaaaaaaaacaaaagggttaatagcccagactttaaagtcagacatacctgaatttgagtcctggctccaccataacaagctgtgagaccctgacaatttacttcccatctctaagcctcagttttctcatttataaaatgggcataatatccttaaactcactgtgagcattaattgaatgacacgatataagtaaaacaccataccgtacatgaattctctatatgggaattcttactaatttgtacctgaacctctccttattcactagaagagtgtgaaaacttagtttcctctctgctccacccacggctttctagcagtcactgtaggcccaaggaaacccaccaccgtcttggtgcactgtaaccagggttgaggtgtctgtcctaattttgaaagcctgccttcagacatttatatgttcagacaaactaatcaggctgaaatttctcatgcttatttgcagctagatgaagcaatccatttagttgctttggaattacccaagcatggaagaaattggtttctcagccttgagatattctgcagatactgaagtacagatggcaccagggccagcttggtaaaaccagaaacaaggggcctgagtttggccctttgtcagggcctctgtccttgggaactggtggttccacctgggccccaacataagcctcagcttttcatttggccagcatgtatcatgaagttacttcttatttcaccctttgggggactctcagctgctcagagcttttgtgttttctcttttcagcttcctcctcaattgatacggatgaagtatttgctgaatctgtttctctttcctgaatcagaggcccagaggcattcatatagttgctttctggtaaaaccttgctgatctggtatttgggctgtcattagactgtagtgcaaaaagacgaggtgaattttgggactccagatttcagagtgtataatatctcttgtagttaatattcacaacccatgagataggaacagacagggaaactgagataccaaaagtaatgtgcccaaagacgtgcagctagtaaatggcagaactgggatttgaattcttgctgactatggttccatttcaactattactcaataccaccttttaatctgcttattataatgtatttcataactttctatgctgtggtattgatcattcattcatcagttacacaattattgcatggaaggatacaaagagaaaaagatatggcaatgtggtccttgttcttagggaattttcataaggtattaacaggagaagcaacaagataactatagatcataatataaaaatacctcccctctttgttagatagctttaacccccctgttcgctgaaggacttggttctgaatgattgaaacagataatcctccgtgattcccgtacatgtcctctgtgcccacctcccactccagcggtgagtccattgtgtttttcctttattggcaaccctaacgtgttggggcaccctctctaactccacagtacgttgtaagtttggtgttaggagagaaatgatctcaggcctgcacagcacactctttttctgttccctgccttttaaggtcatgccctcttgtcatgaatataagaatgcctgtgcccccttcggagaccggtgccactttcaggctgtgtgcatgctcactgcccctccatcctccttgagaaccatcgatgtgcacagagggttgtactgtttctctgtacatcccatcagcatggcttactcaagctttgcttcctgtcatatgtactaaggttttcaatgtgaaaatatgaaattacattctcatactaaataggctcctttaatccacactcctctctgagaaccaatccactttaccaagatctacccctcttggggctgtgctccctggttaagaacagctggtttagtagcaagggagaaggcaggagatgatttaaaacagaccctgggattctaaaagtcctgggattttataattcctgggattctaaaattagctgggaagattttgagtagcggaaaagagcctgccaactttagccatcctggataataccattctgttttagcttgatcactaatttttctgaccccatgtagaaaacgtatgtaaatcatggtggtggtagcagcagtagtagtaacaacaataatgataataatcatggcagtagctcccctttttttattttttattttttgagacggagtctcactctgtcacccaggctagagtgcagaggcacgatctcagcttgtcttggctcactgcaacctccacctcctgggtccaagcgattcccctgcctcagcttctagagtagctgggattacaggtgcccgctaccatgtctggctagtttttgtatttttagtagggacggggtttcaccaggttggccaggctggtcttgaactcctgacctcaggtaatcggcccgcctcagcctcccaaagtgctgggattacaggcacgagccaccacacccagcctgtgttagattagtgttagagtcaccttattgatctgtcaacactaggtcttatttcttcaatctatttgtacccattaagaagcctttcctcattctcccctctcctcacccttcctggtctctgataactaccattctactctctatcttcatgagagccacttttttagctcctacatataagtgagaatgtgatatttgtcattctgtgcttggcttatttcagttaacataatgaccctggttccatccaagtggctgcaagtgacagggtttcattctttttatggcagcataatattccattgtgtatatatgccacactttcattatctcttcatccattgatgggcacttaacttgattctgtatttgactcttgtgaataatgctgcaataaacatgggaatttagatatctctttgatatattgatttcctttctgttggctgtatactcagttgtggaattgctggatcatatgatagttctatttttagttttttggggaacccccatacagttttccatagtgctgtattaatttatatgcccactaacagtgtgtgagggttcccctttctccatatccttaccagcatctgttattccctgtatttttgataaaagtcattttaactggggtgaggtggtatctcatggttttgatttgcatttctctgatgattagtgatgctgagcatttcttcatataacctgttggccgtttgtcttcttttgagaaacatctatacagatcttttgcccattttttaaattgggcttttttttccccctattgagttgtctgagctccttatatattctggttattaatcccttgtcagatggatactttgcaaatgttttctcccattctgtgcattacctattcactttgttgactgtttcctttgccgtgcagtggtgcagctttgctgagctatttctctccagcggacgaagttgtccctcttggagagtgagatgcagttgcgtcacaggatgttgtcatatgctgggcatgtggcacaggtgaggtccctagagccgtgaaggccaggagggctggttgggaagcatagacctacatagcatgaaactgtgctcttcattttggttttgcatctgcggctttctgagagacctgagctgacacatggaacagatatggttctcccttgagaaattgttccaaatattttgatgtacttcagccagtcactgaaactctttagagtgggaataatgctcatgcttgccttgaacagcagtggcacagagtgattgaaagcctgagctttgaagccagactgctggggtttgaatcgcacctcggatattaactgctttaccttgggcaagttttgtaacctctttgtgcctcggatttctcatctgtaaaatgagacataataagaaatgtaccccttggggttgttgtgagaatgaaatgactttctacctttaaagcacgtagaacagttcctgggacctagtatatatagatggtattacactgtgaaatcatttgattctctaaatcaaatgagaatgcttcataaattgcaaaataccactcagtactcttagcgacagagggagaaaaaatggaatattgtgttggaagctatagtttataatcccacttcatgtggcagcaataaaactggcaagttattgatggggagcccacaaacatgacaggctccccagaacaatgatgcctcatctgtgcatgaatacccctggggaacttcaaaatccatatcctatggttgatttccagattcactgaattagaattttgcagggatacggggtactcaggaaggttttgtttattttttacagaaagatttccaggtaatcctaatgcagctgatgtatggactggtgtttggtaacttctgacctggatgctctaacagttggttatatttaatgggatgcaggaagatttagtagagggcctgacagcaggtatctacatttacataaattttcattaggtaatgcggatggagcaacacaggcagatttgtctggaggaaattctagacatctaaagacacctaaatcctggggctgagagtatggctctatttcttattgaggtcagttttcactggctgactgattcccttaccatgaagcacaaggttgatgggtactcttaattgtgtgaaaagtgggaagtgggaatagttgcaaagggagttggaagtaggcagttttgaatcctggcttgcctgctgcatactggatggaagctgcagatggaggaaacagtgcagaagactcactgagcaggcatttggatgactggccagcagatggggagtggagctcagtagatagccattctgcactcttcaggagagaagaacaacctggggccatgtgttcaataaagagatggggctggcacattgttgaggaggagaaggaggatttcaaatggagggctttttgaagaaggcattgaacacctccccacccacccctgccctgcacttctccctgtagctcagaaaccttttaatagccatgggaccaacatctagcagctggcttggttttgctggtccttgctttaaaatggggatacatatccctgctttacagacctgctgtggagttggatgaaatggtggatatgaaagtgccttaactgtaaagtgctgtacatacttacagaagcattggctaccatgtggagatggcgtgccccttggtattagtaggaggggacagactctgaccctctaccaggggtaaagccccaaatctaaagatctagaaacattagcaccttcatttcaaggtctgatatgtaagaggatggacattcctaagatttattgtgggcagagtagcatgctcacccctgatggtgacagtatccgtagtgggttctcactgtgggctgttgcatttaggccactggttatgcctgcttcccagagctcacatgtaactccattcctttctcctctactcaagaaggtgcacttatgtgtgtatgaaacagggacattattaaaaaggtaacctgaatctacctaattaaaagcacaataaattcaataggttattcagatttccatactgtactgttagaaataaatgacattcacacactgcatagcagttgtgaaggtgagaaccgcgactgtgggtagggagatcctccagacatcagcaattcccatgtagtgtgagaccaccgtggagggctcctttgtgtgtctggcaccgtgggaagttcttagggggacaaatgaggtatcattttctggcccctcaaagtactttcatctttccaggaatgtgtaattatgtgcccaaatgagtggaaggctcctaggttctgtagttgttcagagaaagaagggactcgaactaattgaagtgattgaatgagcagcacactgaaagctagctgtcaaatctgtaattataacttctgtgcagtgcatttgacattttacagcatttctataaggataatgaattctgatgccttcagaagccagataggtaacaaaaatcagggaagcagttaggaagactacacttggatggttagtattgtggtgaaccagaatgcgtgtggcccacctttaagacatggcgatccaaaatttaaaacagaagcatagcacagcacttctgattttcaaagaacttttacgaatgtcctgtttcatgttcacagcatcctatgatgcaggtctgttctccccttccagagataagaacacttaccaagatcagtaaaggtggagatagcatgtgacctggagactgcaatgccagtgctcagagctgtgagatgctttccctagaggccctgggtcccaggaccaagcccttggggaaagaaggtatcatgctttcctgaagtgtctgccctctccccagagcttccctagttattctctgagcacagctctggggagatgggcctctggacctgtttgtttctactgttaccccgtgacttaaatgggcccaggaggcaaagactaggaaacaccaagaaggctggtgtgggaattgaagaaaaccatcaactgtgtcaacagactggacccaataataggaacaaagtgctgaaatcagctttgcagtcacatttagttggctgacctgtgatttctcaactgtctcttttttatcttttaaccatccatgtcatttttcactgaaagaaaaagagaaatgcagagatccagatggagtcccttgaacccttgagccaaagtacagaaacccctgcactgtggctggatgcccctgaaggagggaggccatgtcagttacgattaatgtgagcagcttctctcattccagaaatgtgacctctggttacagcaaatgtgacaacatgaattaccttcaattatggtgaactacgtttaactacatgattgcctccacaccttggtgggaactggctgctttgatagccttgaccatggaagaaaaagacagtagaaaagacttggaaatgacaggcacctagaatctgagtcaagggtacagtggcaggccaagggctgtgggctttctgtattatcagtaaatgtgatatgtggtttgggctttgattcccaccagtgcttgagaaagggatagttacccactttattgagctaaaatttacttaaaacatatgcctttaagtatatattttacagatggatgttttgataagtatatacactctgtaactaccaacccactcaagatgcagaacactgctatcaccataagggtcccttgtgccctatctagtcagtcctcacccccaattcctgacccaggcaaacactgatctgctttttactactatagattagattcatctttttactattacaagttatattcacgtttcataagtgaaatgatatagaatgtaatcttctgtgtgcatcacaagtttgtcctttttatggctgtatagtagtccattgtatggatataccacaatttgtttatccctgtacctgctgttggacattagagtctaaacattggaaacattgttttggctatgaaaaataaccaggttttggctattacaaataaagtggctatgaacattttatataggtgtttgtgtacacacatatatgcttttattacccttgggaaaaatagcaaagactgcagttgctgggccatattgtatgtaggtggggttttggccctcattatttttgatgctccctggtgatacacctgtgaacgtattatgttacagggcaaaagggactgactgtgcagatggaattaagcttgctgatcaactgactttaagataggaaaattaccctggaagtgggcaagcccagggttatcacatggacccttaaaatcagaaagggagggcataagccaatcagagagacatggtagaaggagaggtcagacttaaagagtgagaactcaacctgctgactttgaagacagggaaaggaggccatgagccaggcattgctgatgtcttctagaaggtgagaaggacccccagctgtgacagcaagagtggggacctgtcttatgtaactaaattctgccagcaacccgaattagtctgaaagtggattctcccccagagaataagagtccagacttatagttttagcttttgcatgtagctctatgattcattttgagataattttatataaggtatctgtgaagtaagagttgaagttcactccttaacctgaatatccagttgttctagcatcatttgttgaaaaactatgcttgttgaataactttggctcctttgtgaaataaattatgtatgtgtgtttatttcggaactttctattctttcctattggactgtatgtctcttcatacaccaatcccactatgtcttgattaatgtagctttatggtgtatctggaaatcaggtagtataagttctccagttttacattaggttctttgtatttccatataaatttaataattggcttgtcaatttctataaaaatagccctgtttagattttgattgggattacactgaatctatatctcaatgtagggagaattgacattttaatatcaagtcttctgtccatgaacatgtatatttctcataatttatttagatttgatttaatttttttcaataatgttttgtggttttcagtttcaaatgttttgcataattttctaaatgcatccctatatcatttgtttctgatgttattgtaaatggtatttatttcaattttcatttgtttattgctaggatatagaattaaaagcagcttttgtatattgactctgtatcccataaccttgtaaactcatttcttagttactttttcggtgaattcattaggattttagacatatagatcatgtcatttgtgaacaaagatagttttccttctcccgttataatcggtaagcctttaatttctttttcctgccttattacattatttgaaacctctattacgatgtggaataggagtagtgacaatggaatccttgtcttgtttgtgatcttaggggaaagcactcatttcttcaccgttaagtatgatgctagctgtgggtttgttgctgatgtcctttattaggttgaagaagtttctttctatttctatttctcaggagcttttaccatgagtagttatggaattttataacactcttttaacgtatctattagaatggtcatatggttttcttttttattccactaatatagtaaatagcattaattgatttttaaatgctaaaaccaccttgctttcttaggataaacatcacttgattgtggtgatggtgccttatccttttgatatattattgaatttaatttgctgttattttgtaagaatttttatgtctgtgtacatgagggatattggtttatagttttctttctttaaatgtctggtattgttggcttcataaaataagctgaaaagtgtgccttcttcctctgctttctaagagactttgtgtaggattagtattatcccttaaatgtttgacagaatttaccagtgaaatggagtctggagttctctttgtggaaagatttcaagttaagaattcaagttattaggccgggcgctgtggctcacgcctgtaatcccaacactttgggaggccaaggcaggcagatcatgaggtcaggagataaagaccatcctggctaacatggtgaaaccccatctctactaaaaatacaaaaaattagctgggcacggtggtgggcacctgtagtcccagctacttgggagactgaggcagaagaatggcgtgatcctgggaggcagagcttgcagtgagccgagattgcgccactgcactccagcctggatgacagagcaagactctacctcaaaaaaaaaaaaaaaaaaaaaaaacttcaagttattaaatagatataggactactcagattttctgtttctcttcatctgagctttggtagcttgtatcttggaaggaattttccaatttcatctaaggcatcaaatttattggcataaaattattcataatatttcctgattatattttcaaagtctataggtattctagtaattgtctttcttttatttctgataccagtaattcatttcctccttttctgcgatcagtctagctggaaatttctaagagtcgttgatgttgaaaaaaccacctttttcttcccttgatttttctctattgtttgcctattttcagtttcatttacttttgcgcttgccgttgttttttccttctttctactattttggatttaatttggtaatcttttctgtggtagaaggttgcacaattgattctagatcttttctaatatcggaatattggctatacatttccctctaagtactgagttacctatgctcagtttttttggtatgttgcatattatttcactcaaatgttgaaaatattttatttatcttctttgacccttggattatttagaaatgtgtttgtaaatttctacatatttgggttttgaccaacatcaaaaggtcaatcattgacttttaattccattatgatcagggaatgttctttgtattcttttaaacattttcaatgtattaatgcttgttttgtggcccagcatattgtctatcttggtagatattccatattaactggaaaatcatgtttattgggctgttaatgggtagaatgttttataaatgccaggttctataaatttaaccaagctgattgatagtgctattcttttgtatacatactgattttctttctacttgttttatcagttatgagagaggaatgttgaagttcccaactatacttgtggattgatttatcttttcagttgtgtcagtttttgcctcatatattttgaagctttgctcctggatgaattcacatttagggttgttatgtttccttgatgaactgatgactttatcattatgaaatgttcctctttctccctgttgatgttctttgttctgaaatttattttgtccaatattaaggtacacctaccttggaaagaccagttttagttgggctttattgttcactatgacaactctgtcttccagttgaagtgtttgtgtcatttatgtttgggttttaagtctaccatcttggtacttattttctattttttccatctatttgttgttccttttcccctttttctgccttcttttagtataattgaatattctttgacattccattttatttctactcttgccacataagctatatctattttatatgtgtcttctctgtatacgtgtatttaccatttatagggctcttcatttctttgcatagattcacatttccatttggtgtcattttccttccatttgaggactttgctttaacttttctgtagtgtatttctgttggcagtgaatcctctcagcttttgtttgttgaataaacttcattttactctcatttgggaagatattttcactggatatagaattttggattgacagtttttcttgcagcactttaaagatgccattctatcgtcttctggcttgcaaagtcagaactttcttttggccaggaactgtggctcatgcctgcaatcccagcactttaggaggctgaggtaggaggattgcttgaggctaggagctcaagaccagcctagcacaggcaacgtagcaagaccccatctcaacaaaaagtttaaaaaattggctggggatggtggcatgtgcctgtaataccagatgctctggaggctgaagcaggaggattgcttaagtccaggagttggaggctgcagttgagtcatgattgcaccactgcactccagcctgggcaacagagattgagaccttgtctcaaaacaaaacaaaacttttctttgattctgtgtacataatgtacacataaggtttttttcttcatttgatttcaagattttttcttgatatcagtttttgggtacttgattttagtgagaggttttctttgtttattcacctctggatttattgagcttcttggttatgtgggttatagtctttatatttattaatttttcaatcattattattttttgcttctacccctctgcccagaacttcgattacatgtattaacccagttgatcttgttcataagtcattgagtttctgttcatcattttaaaaaccaatctttaattaattttggataatgtaaatgtagccatgttcattaatcttttcttctgtagtgtctagttcaaggataagcaaatttttttctataaaagatcagatagtaaatattttatgctttgtggaccagatggtctgttacaatcacacaactctcctaatgtatcacaaacacatgcatagacaatacaccaaaaaatgagtgtgccagtaaaactttatttatgacaacaagctacggtctgggattaggtctatcggccatagtttgctgaactctggtctagtccactgttaattccatcacatgtgaatttttaattttaaacatcttcatttctagaaatttcatttgatttaaaaaaatatttgatatttcctctttcattatgcatgtttttaaaaatacttgaataaaattatgatagctgattgaaaatccttgattgctaattctattacctcctcatttctaagtctgtttctgtttagtaattttccaaaaactgcttatgggtcctattttcctttttcatgacaattctagtaatttttgattgaatgctgggtattgtaaaaattatattgtggagcatctgaattttcttcctttaaagaatgtgtaatttgttacggttgacagtcaagttacttgttgctcatagtgatcctttcaaagactgtctttaagcgttgttagggtgggtttaggatcaccttttagggtctctgcctaaaccccaagggatcaacaacatcttttgactctgatagttggaaaatcaaatgaatgctaaccctatgcgaatgctgggatctgttcagctcacagtttcagagttgctttttgcttagcctcatggagttttgtcctcacatctatgacttagtattcagcaaagactggagggtttccctcttcagatttctggattctttgccctgcagtgtctagccacctcagactccctacattccagactgtttcctcagctcagtgagacctttgtgttctgcttggcgcccccactctctgcttcacgtttcagaatgaacctccaggcagaaagctggggcagtcgtgaagctcacttggtttgagagaagggagcccatctctcaggcattacagtcttcactgtctgtcgttgaatactagaaatatttgttttatatttttccccagttttcaagttgtttaaggcaggaggataaatttggtccattttatttcatcattgccagaagtagaaggcagtcgtcacctttttaaaggtgatcatttataaacaggccgaaaaatgcagttctgtaggattaaagggaaatttcagtttgagtttttaaaagtgagacagttaataggttatgtaggtaagagggcactttgcttctgtgcaaacaccacagagtatgctgctgagttgctctgattaaccctaaatttgtgaatttaagcttataaattaaattctctataatgtatttatcaagtgccaggacagagctattatggtttttctatgctttgcattggcttctgcaaattaagtttcatttcccttttgaccacaaagaagatggccctattcaagacttcctcgttcataatgcctcagtttgttatccctccctcttccctcttcttcctgtacttcctgcttctcagtaatgatagttgttcttgtgatctagtagagtggaaagagcgtagtatctgaataagaaaccagacgttgtaattctggagccacatctgactctgtgacttgggatgagacactccagccctcagcatctgcttcatattccttatttatataattggcacggccatctgtgtgtgtgtgtgtgtgtgtatggattcaaatattttaaaaaggatgtgagaactctttggaaaccataatacatgctgtgagtgtaaggtgtttttgaggtcactgtgaatttcctcactgagactcaacctaacaatggaaatgtcttcttgtcccactaaacgctcctgcagaaatacccagcttctgcttggattgagaactgtcactttctgacacttcttccttatattgtattgatacaaggtttcgggcagtttctgctttttgtgatagctgtgctgttggatctcacacttgctctatcaatctgtatctgtaaccaggagacagaaatcacgtagtaatttgaataactaaagttcaatataagaaattattaaccatagtggaattggagtaatgaaggattggctagtaagaagtagaactctaaagaagataggaatagataataagatacagctaggtgtgctggcgcatacctgtagtgccagctactaggaggccaaggtgggagggtcacttgagcctaggagttcaagaccagcctaggcaacatagtgaagcccccaactcaaaaaaaaaaaaaaaaagagagacaagaaagtacccttagggctgagatagagcacttgaggaagacatcgtcccggggctgagatccagatcttgttgcacagagcttgactgtggttcactgaatggcatagaaattgtttttgtgtcatgaggatggtggggaagtctctctggtcctgtgctggtagaacttgctggaaacctatcctctggaatttgccagaaatccgccctctagggtgccaagggaagatgtgggagatatctcactggaggcgctccatttagaaactccccgaggtgtaggaggtggggatgctggagaaagtgctggccagtgggtgctgttgtccacaggcactgtaggagctggccctggagaaggcaggtacactgcaggagtgtgctgagtgagcacagtacaaccaggaacaaaatgctttcttcctgttaaagcgtcacactttgccagttgacaaaggaagaatatttataaggcccacattcgtttcacagaacaagcaaacagggtgtacttggaatggagaggtaatcagtgtataactggtacacctcatggctactcagcttccatacgtcccttttgtgtgaactcctgtgtgtcataacaactgtctctacctagcaagatgcagctaacttggttacaagtgaagaagttatcaccattccccaaaatgaggagacacacagtgccaagagtcaccatactccttgctggctatcttaattactcctcaaattcatcacactcctgtggaatagtctgttatctacacactaaattgtacttcagtaagttaactatgttaatttcccacaacttgtgtagaagatcaaaatgggaaggagagagaagaaaatgactaacacatttaaataagatgcaaagataacaggcaaatagaaaatatgcaaagttgctgcagccttcattttttaaattggtcaccagaccatcattgacatccgtggcttcattttttccactatctattttatgtgtcccctgctctcagccccatcacctgctgttcaggcttcttcacctggtagagggacccaaaccttccttcctcaggggttcaaatcttcagttctcctgcctggttttggttgctgtaattctctattaacctttactagaagccatggaaataataagagatgcaccagaggatcacccgggttccagacctggcctctttgcctagattgggtagaagcaacccggttgccctgtgctaatcataagcaatcacaacagacagtagattaacccaccctttcctgcctgttggtttggtgacataatgggaccaaagtgtccaggtgctcatcccgtgtttaaattcggtggaaccactgctttatagcctggtggaagaatccccatttcctcccttggggaccaagatctccaaaccagtgggcttaaagttgctgagacaggaatgaaatattctgtgcattgtttattagcgagaggagccaccctcactttcaccctttgaattctggacccacatattgtagctgtgagagaggctgcaccatatatgggtttctggtccaaagcatatgctgcattctatgaaacagaattctactcttcaggttattttgttccaactggcgctgtaacttgggtcttttggaagcctttctacttttcagttagggcagccacttctgggtgacaaggaaatgtcaaactcctccttggcagttcttttttgacactgtatcgatagcaggtttgctgcagtttctgtatttttgttacagctggcctgtcagttctcatacttacctgctttccagtatgacttgatgtgtgacatcaggtaaatcctttcctctctgtggacctttgagtctccacggaagagtgggaggtttagacttgatgatccttgggaaactttccccttctaaagcattcttgctccagtgaccctgcagggtgagggtgagctcagttgggatggtgcaggtgaagtgaattgtgaatgctaagggctgtgcacgtagcagggttgaggtatgatgtgttcttctcactatcagtggttgtgatcagcgttcgactttgaacctacctggagctgaagaaagggtaccggccccccggttcatatcatcatgtctctgtttcaggacccctagaggcagtgctcattctgtggaggtgggggaagggacaacattgtggagagaaggctagaaaaggaatgaggaagaggttgacattcccagtctgtgtcttcctgtcccctctttctctgctctccctcacagaggctcacacgcacattctgtctctctgccatccaaacagatgcagctgctctggagtcaaccagacttaacgaggagacaactcttctgctttcttccgtcttcttcctacccaccccctgacctaatgctgtgcttgcctgttacagcaggcctaggaggaaatgcactatgccttccctgtttttgttttgtgtgtgttttgagatgcagacctaaaaatattctgctgtataatcggttatccaatcagccatgcgaataatcactgtgccagagcctataggaaatgaggcaggagcctgaaactcagaagcatgccagctttgccttgcctttttttctttttttttttaaatgtgctcccttgggatctgggtttgagggttgagataggaggatatgctgggtgggtttccatggaggcaggtgcaggacactgatggtatgtctccctggtgggttgaggggaaagaatggttggtgtcacagtaggagttttgcacgtagttgaggcagtttgacttatgcctcttgaacctctattccctcctctgggccttgcttccagatgctgcctccctcccccagcacacctgcctggaatgttctctctcctcctctctgcttttccaagtcctgccgatcccctgaggtctagccctctatgttgtcagcaggaccaaccattcatagcggctgttgtctcacgatactcactgttgatagcagaagcatccagctcccatacctctgtgtagggcttgtgtttccagagtcactgtgtgctctcctctccactgtctcccccaattctctccaaagccctccgatgtcagtgggtggggtggaggtagtgaggggaggcaggaggaggtaggtagtttagtgtttaggctaagagcacaggtcttggagtgacagatttgctacttccatgtaacctctgttaaattctttaccttctaagcctcagtttcctcatctgtgaagcactgaaagtagtattttcagtttcataaaccctagggtttaggggtgttatgacaattaagtgacgcattgcctgtaaagtacttagcataatgactggctcctaggcaatgctcaacaaacatgaggtatgacattgtaattatcaccatcccactttacagctgaggaaaaggaagtgtggggagcatgggcgacttagttcacttgtacagtaattgactacccagcaaggactatgggtggtcaactaacaggattattcagggctggctctaagcccaaccaagtgctagatgctgtactggaacagtgactcaggcactcagctagggacgcagctggggaggtagatatttacatgtgagcctcaaatgtactgggggagatggaatggaggcatgtgtgcagtggaaagagccctggacttggagaccaaacagaagccctgtaaggagagtcacttgtctatcatttccacccttttgtccccagcacccaggccaagcccaggtatgttttaggtgctccatcagtctctgctgaaggaatgaagaggagccccgagccacagctctggctgggcctctgacctggggaaccttgaacagctctttgcatccaccaagtcacagggacctcctcagtacagggaggggttggacctgtagggacccgccagctcttgtggtcccacttggtagactcgacagctcctagcagctgcacagtacccagtgtgtgtctttacctcagttgtgcttttggagaagcagttggagaggtgagggcatgaagggctgggctgacgggcaccaaggtcgcccaggtgctggcagtgctgcagacagcatgtagctgtcctcagatggcccaggtctggctgggctctgcaggaacacttcagctcatgggcagcctggatttgtgctgatgcggagacttccctggcagccacagttgctgctgttgctgctgcctggtcagagttgagggctctgacaacagccaccacagctcgcggtctgtccactgctcagaaacctcacacaagaaaacttctgagactgcctctgaggccctttagatcctgagagccccacactcacactgcagcctccccaaatacagccagaacccacccgcttctggttttccatgtggaccatttattgcacctgcccctcctctaggcatagcactgcactttgggctccacccggtcctgctcagatgttgtgctccttaaggaatctctgctcgttggtcagactgactgttttcctccaagagtgcactagagtgtacttgcttctgtctggcgctttatcatctgtaaggcagggcactacagtagttgacgggctggctttgctgttgcacagactgagattgaaattctggccctgctgctccctagctgtgtgacctcgggcaagtcacttcacctctttgacctcaatatcattattggtgaaatggggttaataactcttaggtcctagggttttgtgggatgatgcacttgtacccctttgcaggcagcccttacccggcagcccccactgccaacgtctctgttgtgttcaagtctgtttcatgagccagtgtaacctccctccatgcagaaacaacgctgtaaagtattagcataacagtaggtccattgggcagaaaccacaccaataaaacgggcacaccccacagtggctctgatttccacacccttcccaaccccgcactcccaagccttgcccagggctttccatggactgagcctcagtagaaagaggttgaattagattttgaattttctcatgcctcctgtctcctggccctcagaaaattaaaatccagcattggaattagtcatggaaaaatccccattttctttcctttcattcctctgtgaagatcataggttcaggttatttctttgaattaattggctaagcctcagtgaaacatgggtaatttacctggcactgtgaggtgctggaaattataaccagtgctcctaaatggatatgcagcaaccaagcaccttcatggtgctgatgggtttgtcctcacagtgctgggagatggctaagcgggtgctgtggctattaccatccttactttagaggactgggactcaagccctcatcttgtggctctaaggtgaatgtcctttccctaacatgtctgaccttctccttcctcggcattgggaccctgggtaggagggccagtagaagatccctcagcagaacttaactggccaccagtccagagtggaaggctgctgcttgtttaaaattttaatccctttctttaagtgtgaagaatactgggcaagtgtaaaagaagggaagacatggtctcttccaaccagaaatgtataaactcgctgcagtgcctaggacacatgcgtctttattgaacaaatagttattgaatgtccgcttggtgcctggccctgtgctaagcattggtaatatggtggcaaaatagaaaagatacctcttaggcttctggccatgggcacagacagttaacaaggataatcaagttacagattgttacaagtgctatgaagaaaatttatgaaaaattaaatagcaatgtaagtaggacacactaaaataatacactaagtatcatgtatcagctctggctgcctccctctctttaaagcagagaagtccaggctctcaggggtgcgacagagccaggacaggtgtctagtgagcggcctttccatgggcagtgtgtatggaggggcctggaggtgtgggagtggccattttagaagggtgttgagattaatttctaccgttagaacccagttctcgtccatctctcttttcttcttctttgtttttgagacagggtcttactctgtccaggctggagtgcagtggtgtgatcatagcttattgcagccttgaattcctgggctcaagtaatcctcctgcctcagcctgcccagtagctaggactacaggcacaccaacacacctggctatatattttttctgtttttgtagagatggggtctcacagtgttgcccagactggtctcaaactcttgcgctcaaaggatttcccctcttggcttcccaaagtgctgggattacaggcgtgagccatgattccccacctggtccctctgttaaagcagaactcacagaagaaagcccaaaggaacaaaatttgtactttcatgatgtgggaacatctcttccagttgagaactctctaaagcatttgcaatcatagatttgtgtaagaacttgatttgcaccctaaattttgggatgtatttattacataagcagatatacctggatttgcataacagaaaggactattttggggtgacttatgacagatctgctatgtgaaagcctccaggaacttttagcatcagttgagacctgggggaaacagagaggaaggagcgtgcaggcactgaggccagaggaagaagggatgtgcctgtcctcagtggctagccatgacactgccagaggagcactgagaagggagcaagaagagcacttcctaagtggcgagaatacccagctgcaaacaaaacctcagacacagcctgaagctctgtgtccttttgtgcagccccttccttaccccattgagtagcagcttggagaagagctttttattacagatgacacctatgaatgcaagtgagggaaaagaaccgactaagccagagctgtgaattcccagaaatcaatatggacgggactggggatgcagctccctcagcttctctctccatggcccctatttgaggctgaatctaggaggccctgtgtttttgatacagtgtctcactctttttctgaggcacttttcaaaatttctgtcccagtgctaagcctgggcgagctccacagagctaacctgtgtgtccagagccagccctggctgtttttccagcttttccttatgccaatagtaagattagggctggggacagtggtggcgagagagtcaagtgtgtgtttctcaaaagttgccttgggagaggagtgaggtgaaaggaatcaaggcaataagtgtaacataggcttaaacatacttgcatgaagaaaacaaaggacttaggtataaacaaatgtttctaagacagggcacaaaaagcaatcatcataaaagtctgatacagtaacttcatcaaaatcaaaacttgtgttcatcaaaagatgctgttaagaaaaagtaagtaagccactaattgggagaaaatatttgcaaaacatctatctgatgaaacatttgtacgcaggacaaataaagcatccatgcaacacaataataaacaagcgagcgatttttttaaatgggcagaaaatttaacagatatttttaatagaagatataatggccaagaggctcataaaaagatgttcaacattattgttttcagaaaaatgcaagttaaaaccataggacatgctactacacacctaccaaagtgactaaaatgaaaaagctaataaaactaatgttggtgaggatgtagaacaactggagactcttaacgcatcatcggaggggctgtacaatggtccagacactttgggtaaactttttttttttttctttttttgagacagagtctcactctgtcacccaggctggagtgcagtgacacgataatctcagctcacggcaacctctatctcctgggttcaggtgaatctcctgcctcagcctcagcagtagctgggatcacaggcgtaagccaccatgcctaactaatttatgtatttttaatagagacagggtttcaccatgttggccaggctgatcttgaactcctgacctcaaatgatatgcccgttaggcagtttcttataaggcctgtgacccagcaattttattcgtaggtatttgcccaagggaaataaaaacatgtccacaaaaatatttatacacaaattattatagcaactttattcataataagaaaaataatgcggccattaaaaagaacaagatcatgccctttgcagggacatggatggagctagaggccattatccttagcaaactaacccaggaacagaaaaccaaatactgcatgttctcacttataagtgggagctaaatgatgagaacacatggacacagagggcaacaacacacactgggtccttttggaggttggagggtagggggcgggagaggatcaggaaaaacaactaatgtgtactaggcttgatacctgggtgatgaaataatctgtacaagtttacctgtaacaaatctgcactcgtacccctgaacttaaaaaaaggtagaaacagcatagatgtccgtcgggagaatggataaacaaattatgatatattcatacaatggaatgctactcagcaagaaaaaggcatgaactgtgatagagggaggtaacataattatgttcaatgaaagaagcctttttttttttttgagacggagtcttgctctgtcacccaggctgcagtgcaatggctcgatctccgctcactgcaagctctctgcctcccgggttcaagccattctcctgcctcagcctcctgcatagctggcactacaggcgctcgccaacacgtttggctaattttttgtatttttactagggacggggtttcaccgtgttaaccaggatggtctggatctgacctcgtgatcagccggtcttggccttccgaagtgctgggattacaggcgtgagccaccgcgcccggccgaaagaagccttaaaagagaaagcgcggtgtatcaaaactcactaaatgccacatctaagatttatgcatttctcaatgtgtatattttactttaaaatactcataaccaaatattaaactctagatggtgatatacatgtgtcagggtttaggggttgagtgtacagaggtctgcaccttcttttgaaatgtatctaaaaataagatagattgatggatgggttgagggatgacaaggtgtgtgataaagctaggaaaatcctagttgcacaatttaggtagtggaattgtgggtattcactgtacaattcttgtagcttctctgtgtatttgaagatgtttgtaatacaggttggaataaatatgctcaagtggaggatgcaagttgcagtagcatgaagggaagataattatgatttatcaccctttgttacacagtgctattttgtttatcttctttaaaattccattaaaacccaccacaggagcctttgcaatgtagctgatttatcaaattcagaagaatacttccagcgtctctgactcatttgatcacctggatacctttgagttaatcttccagccacagctctgattctccccttttgactgtgatcatcctgaaggtgtttccctcaatgctgagtgcttggagccgctttagaattgctttcactctctgttaatttggagaacaaagaatcaataagtagaaggagattgggaaattagtgatcggggacggtgcagagttcataaataatttaaaatatacagagttctggcttttcaacagagattttaataaaagatgaacaaggtcatcttcttccttctgatgaaagttacccatctgtagtgccatggcggatgctgtgtacaagagctgaaatggtggttcctgttaactttgagagctttggacaaaaatgccagatacatccttctagatagcaatatcaggcgagcctttgagtggggaggggaagttataaaccactgtagagaatcacagagtgaaccgaggacagagattggatcaacactccattccttttctgttttcttggaatgaagtcagagcaacattgttttcatttttgtttgcagtgaacctaatttttgaactgatctatgtagtaataagcacaggaaaggaaaagtggaagaaaggagattcagcacattagctagtgaggtcttgcgtgataacgaagacaacacaagcctgagccctcctggctagtgaggttggctctgcctgcctttgcccatcccaccaccttctcccgtgctgagcctttcccagccagacagtgttttgaggggcctttactacccctctccctgccagccccagcctagctgtaatcacccatctggaaggcgtgttttcctggcatttacctcccattatatggcacttcacttgggaagtgctccaacagaggcactctgctgtatcccaagaagccctcaatggcattaccgtaattctgtttatatgacgcacccccaaattcttgagctgtggctgtgacagaatcagtaattggaaatagaatttctgtgatagtcactgagttcccccaagtattaggcctgggagtggacttgtccaggtggtatccgtgggattgtgtaggggcaaacagcgatggataccctgttgatatactgagagatgctaagaaatccaaagcattccagtgacagcgaacattgcattgatagaatagggatgtaagaaggctgattaattgccacatttgataaagggttggagaggggatgaagggggaagaacgtgtgtgtgtgcatgcacgctaaggagtaccacgatagtttgtgtgtttcttccattgttttcagccctggataaagagggcccacctgtctccaaatccctggtagcaggcagagctcagtacagtaggctatattgggtatagggcatctatgaggcaaagaccatatctcactcacatccgggtcttgaggtcctgacattgagagtgtgccctggaaagagcaccgaaggttagtgagggcagctgcgtctgagcactggtgctgatgctggtgggatggactacagagtctgtccccactacctttggaagagctacccaattaaaactgagttggtggaggtattcccactgtgtctcccacaccttctctcgagggttcagatatgtcgcgttctgacttcccagcagcctgcatcatgcctcttgtctccagcacttccctcactgtgttcttgctctactgagtactctcagctgtgtggttgctttaggacccaagcggtgctgttccctcccctaggaagatgtgctcttctgggatttgggagcattcatgacatcgttctctgtaccaccctacaagcatccctttccctaccaggtttgtaatatagtcaacttttagggagggggacatgtgttcatttattgttttattaattattaagtgcccttgctgtgttgggaatagacaaggaatttgccgaaactataatccataaccacccagatttctattagaccttcatgttcatttacagataggacttaattttcttaatcagttaccaattgttgggtgactggttccctgttaatgtatggttgggtgagtgggccagctgggtatacagaggttcagggtattcaatgcagaaaggacctgaagatccatggaggtcatgtggtccaactttctgccttcagaggaggagtgtgtgtggggtgcacatctgagaaaatttacagactaggctggggtggggataaaggagagtcttatctgtaggtctgctgctttgggtttctttagattagcttagaagctggaaactggccaacgaaatgcacagaattgctggaattctggagaagagtttgcaccttactctgtactttctaattaaaagggggacccctcagaggtgattccgattctggactcccactggtgtagtgtggcaggttgagtttgccgccccgggcacatcccctcatggtcagagggatgaagaggagggggtgaatgtcaggttccagaaaagcctgctctaaagtcatttcctggtcatgctgatctggaaatagctgagaactgtgattgagacccaagttttgcccccaaagctagctttatatatggttgtagcagtcaggacctaccagatggaggggacctgtgggatagggataacaggtgccgtgtgcattggcacacaggagggcaagaggggagagagggaaaggctgcgaggggaaatggagagagaaaggaggctcttaggaaaatccctggaggagggaagacttctaacctgagccgaggccctgagccagttcctctgattttttttttaaagtcaaacatggataaagtcacactcaggtgtcactgtgaggggaaaggtggagaaaagtgactgtggtttcagtttcagctttagccaccatcttggcttatgatgttagatcagttcttgcctctctctgagcctcaatttacctatctatattttattagttgaggaatcctgaattgtaacatgaaatggttgtatgtttccaatctctgcttttacctgtgccttgttggatctccctctccccttcctagatgacctcttgggcagacttcccattttcagttaacgaaacgtcagtgttttcatctgatttaagactccttcttgctcctgccttgccactgtagtaagggggcgtgggctgctctccctacctctcagctctgactcctccattagtgagaaggaggcagagggataggagcaagtacctttatgcttaactgggcacaagagatgttttcttcctggttggtttttgcagcttctctagctgaaactggccaggcagcagcacccttggtctgacaggcatctacgtgcagattcctgctgaaattctgtggagacctctccacctcacaggtcccaatagggatttgtggctctggttcagccactctgatccctgctgcacagcctctggttgctagagtaaccttgcatggtggccagttcccctgggtgagatcccagagagagctcaagcctagccaccctgtggggcccacttaacttgcaggaagctcatgggtctctgccaggtcaaaaggtagcatggcgactgtcctagcacaggcgagcggagcagcggttcaggactgtagccaaagctgagagttccctggggtctgaggtgctagtttatccatcttgcaaacgtgattgtcttgatgattctcttaagtccccgtttcttagatctaggaaggggacctccctctagctgttatcctcttccacaaggctgccaacatgctgatgctgtgttccctctcaagcctcactagcctgtggctgtggatgggtggggggtgggggatggtggaaaagggatggttgattataaagggctggcttagtgagccctgggctggggagatgtctagttccatctgttggtttcttagaaaatgaggtattcaggccgggtgtggtgactcatgtctgtaatcccagcactttgggaggccgaggtgggcagatcacctgaggtcaggagttcgagaccagcctggccaacatggtgaaaccccatctctactaaaaatacaaaaattagcccagtgtggtggtaggcatctgtaatcccagctactcaggaggcagaggctgaggtaggagaatcgcttgaacctgggaggcggaggttgtggtggccctgagatcacaccattgcattccagcctgggtgacagagcgagactccatctcaaaaaaaataaataaataaaataaaataaaatgaggtattcagttcttgttttcagcagggagccctgtcttctctaatacctgggtaacaggaagcagtcacccaactctcctttatgtacagaatgaagaattttatcataacccacactactataccttagatacacacataagcacaagtgtcagatgcagaccctgtgccttttatttgtgttgtctttctgtgcttttgctgttctctctgtggttatttgtcaaagtatgagggtaacttcttgtggaaggacagatgttaagtattctttaaggccattgtaagctccccatcttccaaaccttagagagtcaacacacactgttctgagtctgctgtgtgcttacatcagtgctgacagaccaaattatagtactccctaacccaattctaaaggatgaatgccatggcacttaaagtattttgcagaaactattattttaacttattttcacagtggctatgggttttttatagtcttgtaggaactttggttaaatacagagtaaaaactgaagctgctatgggaataatgagggatcaggtccttcaaggtcttaaaaaaaatctctaagtagcagtttcttttgtgcctgcaattctgaattgcagtgtgtccctccagacaaagctgagcgccatatgtgactgtgcctgtttgtgttttcgaaagcctcagcggtcactgccatttcagtgcctgcaagtcttgacaggaagcagtggtaaaagactgtcagaacctgtttgtaaaaatgtttgtgtttgcaaagatttttgctagtattccatgcatatcttagctattaagcaaaaatattataccattcatcttagaagaaggaacaaggctaggtaatcactagcattctcttttctttttctggcagagaactgaaagccaagagcattctatctcatgagcactacaggtctagggcaggggtgagcaaaccttttctgtaaagaattgaatagtaaatattctaggctttgtgggccgtgtggtttctgtcacggctactcaggtctgctgccacagagcaaaagcagccttagacaagaaaacaaacgagcgtggttgtgtggcagtaaagctttatttacgaaaacctggctggtggaccagaggccataatttgccaacccctggtttagtgaaaagaacaagtttcgagttgtcaccgatggttgaatttagcccaagatggtagctttgcttgtctgattaccttcatgccaacccacattttctctggctgacactaaccaggacagaagcctaggctggtcttccattttctcttaagaaagtgatcagtttatgggattgtatgcactttacctcacccacagcagatgttcaggaactgagtatccaacataggataaaatacagaatgaaagcatcctttaacattgagatgaggttgtggtgaaggggaggagttagcagtctgtcactggggtgactttctggggagctctaatcagtcatgtgtttctgctagcagcagcatcccctcctcattcctcatgtggcatacattgcaggtcttcctggcgcagatgctttctttgctcacacacattccctcccttctttcgtttttctccccccagcacacaatgctgctgctgccacacaccatttcaccccatgctggcccacaaagaagacagaggttgatgacatagcatgcaacttcagaaagttcaccactttgagccccgatgtataaatggtagcagttggtactaactctgccagtgcgttcaaaagtcatcataaggacaatgtgatatttatttaaatacatattgcattgctgactgacagtgtatttgcagtcattatccatttctagagacaagttcatggcaagcatggtaaaaagctggacctcaggagggaactgaggacaaagtaagccctgatgactctcactggcctcctgctgcacctgtccttatatttgacctgttaggttggttactttaaaaagccagttacggggaggctcatttaaaaagacataacacctgtgaaagattattttaacgtggaatatatgactggacaattatttgccaatctgatgaagtagggccacaggttttgttttcattattctgtatctactgatcagcatatccacttgcttgcacaggctacacctataatgtccacaacttccagttgcctcttatgtaacaatagaacaagaacataaagatacagaggaaagctgagagcaattctaaatgtctatggttttttctttatctcttgttgttatacatccatatctgattcaacaataaaacatgtaacattgcttatccagtacttccaatggattcagcctggtgttttggaagaaacaactctttcttttgcactcgtatctcattatttgagacagtacttaattaatttaggtagttactaatccaactgacataaacttgggaaccaaccaccaactcctgataagcaaacagctcaactcttggggaacaaaaacgtgtaagctctttagaaattaacaagtcatgagagttcagtatggcttgggcgttagtcattaccttttagccagagggaacaaagaatgccagttcaaatgacaagttggttaaaaggaaatctgacagcttctagagtgttggaaaagaggtcaagacctgagcttctaccctcaatggctcaaacaggcataccttggagatatggttggtttggttccagactaccacaataaagcaaatatttgcagtaaagtgagtcacacaaatgtttttgtttcccggtgcatatgaaagttatgtctatactatactgtagtctgttaagtgtccaatagcattatgtctaaaaaatgcacataccttaattaaaaatactttattactaaaaatgctaatgatcatctgagccttcagcaggtcataatctttttggtggtgaggggctttgccttgatgttgatggctgctgaccgatcacagtagtggttgccgaagaaggctggggtggccgtggcaatttcttaaaacaaggaagtttgccacatgatagattcttcctttcatgaaagatttctctgtagcatgggatgctgtttgaccgcattttacccacagtagaacttctctcaaaattggagtcaatcctctcaaaccctgccactgctttatcaactatgtttatgtgatattctaaaccctctgtttcatttcaacagtgttcaccaggagtagattccatatcaggaaaccactttctttgctcatccataagaagcaacccctcatttattcaagttttatcttgagattgcagcaattcagttctaccttcaatcttcacttctaatacttattctttgctatttccaccatgtctacagttgcttcctctactgaggtcttgaacccctcaaagtcatccatgagggttggaatcaacttcttccaaactcctgttaatgttgaaatgttgactttctttaatgaatcacaaatgttcttaatgacatccagaatggtgaattcctcccagaggttttcaatttactttgcccagatctgtaagaggaattgctatctatgggagctggagacttatgaaatatatttattaaatcataaggcttttcagagtcaaaattactctttgattcatgggctgcagaatggatattagcaggcatgaaaaccttcatctccttgtgcatctccatcagatcaggtgcattgttagtgagcagtaatattttgaaaggagcttttttctgagcagtaggtctcaacagtgggcttgaaatattcagtcagctgtgctataaacagatgtgctgtcactcaggctttgttttccatttatagagcatagagtagattgagcatcattcttaagggccctgggattttcagaatgataaaggagcattggcttcaacttagtcaccagctgcattagcccctaacaagagagtcagcctgtcctttgaagctttgaagccaggcattcccctctctagctagaaaaatcgtcgatgggatctccttacaatagaaggctgttttgtctacatgaaaatctgtttagtgtcaccaccttcatcagtgatcttagatcgtctggagaacttgctgcagcatcctcatcagcacttactgcttcaccttgtacttttatgttatggagatggctgcttttcttaaaacttatgaactaagccctgctagcttccaactttctctgcagcttcttcagcctttatagaatttaagagagttagggccttgctctggattagactttggcacaagagaatgggctggtttgatcttctgtccagacccttaaaacattttctgtatcagcaataagggtgtttcactttcttatcatcatttgttcattggagtaacacttctaatttccttcaagaacttttgctttgcattcacaacttggctaatggtttggtacgaaaggcctggctttcagcctgtctctgctttgaacatgcctccctcactaagcttaatcatttctagcttgtgatttaaagtgagacatatgagtcttcctttcacttgaatactgagaggctgttgtagggttattaattggtctaatttcaatgttattgcgtctcagggaatatggaagcccaaggacagagagagagagatggagaacagctggttggtggagcagtcagaacacacacatttatcaattttgttcacagtcttctatgggcgcagtttgtgatgtctccaaacaattacaatagtaacatcgaggataagtgatcatagatcaccgtaccagatacgataaaaatgaaacagtttgaaatatcacaagaattaccaaaatgtgacacagagacacaaagtgagcacttaactgctggaaaaatggtaccaatagacccgcttgttgcagcattgccacggatgttcagtttacaaaaaattgcattgtctgtgaagctcaataaagtgtgaagtacaataaaatgagatattcctgtataataataactattgtgtgcatactatgtgctgaccattgcacattatctcatgtactccttttaaccgtgctttcactgattagaaaaccaaggcaagggctgggtgtggtggctcacgcctgtgatcccaacactttgggaggctaaggtgggcagattgctttgagctcaggagttcaagaccagcctaggcaatgtggcgtaaccacatttcttaaaaaaatattagcctgtgtggtggcatgtacttacggtcccggctgctcgggaggcggaggttgtaatgagctgagattgcaccattacactccaccctggggaacagagactctgtcttaaaaaacaaaaacaaaaaggctgagttagagaagagcaaagtgcttgcccaaggttatatagcttagaccgagtggggattttgaactcagactgcttgactccatatttactgtgctctccagcttagggcaaactggtagccgggaagtcatccagctcaatttcagcttgcctcctcctgatttcctggatgtctggtttttaaaaagttaatagcaaactagtatagtgttggctccacagacgtgcttttcagaacccacctatttgccctttactggtaatcaggggtaatcctgtcccatatctgtaccctgatatgtctgggttgtaaaaagtgtaagactggatggtacagttaagctatttgttctggatttgggttttttaagtttggcatttgagcagaatcacaagttgtagaaagtagtaatttccagacatttgagatctgattcaccaacattactgtaattaaagaaaaacctatatttgtttgctccgttttgtctcactaggatgttttataaataataaacctagacatttagaaaatagcatctattcagctggttaagctttcgtggcccttcatgttcagatgtctcaaggtgatatgagtgtgcctcaatttatagggagtgactatggatggtgaactatattgacatataaaggcagctttaaaatacagactacagaaatcaagtggcttgacaattcccttagaacatatgtttatgaagtatagagctcaaatgtaatgatttcagttggttacagagtattaatgaattttgaattgaggcaattgtgatcaagcttgttgccttttctaacatgaatcattattaaaatgatgattgtcctccatagttatgaaagcattaaaaaagcatctacctatgcctgaattaacgggacagatgtggttttcagctttcacctggccaacaggacttccatggttgtgatttcaaggtgcttgtttatgtatatggttttgctggtattttctgagtcttcaataccatttcttgtaatagggtgtgaatgggtgtgtgtgtgcttgctagtatgtccccttggtccttagcattgtgggaatgtaaagtgaagctgagtaggatgtctcaatgtcctagaatcctccagcctttggtttttaagaggtacccctgtgcgagagctcgtggaggcccttctgtgtaacattcacaacacaaccaccacattcagtgacagcaggtgctgagtgcaaaccgtgtgccaggcatttcccaccatcagtatcaatcctcaattccagaaagttggtactgttgtgaccattgagaggatgaggagaccgttgcttggagactttcagtgccttgcctagggccacacgatggaaaagagcagaaccaggaattggactgctcttcaccatcctcatggctgcctggagggcaggcagtcttgggcttccttaaaagatttttgttttgggagggctcttcactgtctcaagaaagctgagggaagaattcgtctcatttagtggatgaggatacaaaaacatatgttaaaaattacagcctcgggctctgtggaccctgttcaggtgccagagggcttttctcctatattgagcacctttgccacaaagaagctagaggaggaaccctcccccgatttcaccttgtgagttacaggtgtctgacagccctgttcttagctaagaagtgtgtgtgcacctgactgcaaacagccgccatgcctgctggaggacacatgtgacacacagtttctggggaccctcctgggcctacagactgcagtctcgggtgggtacccatggcccaggacttcacattcctcacactgccctgccctgcttctcttctgtctgacctgatgccccaggcttagggtggggaggggatgctggtgggtgggttgtcattttcctgtcccagtcaggtattttgtattgtttctcaatgagccatttcccatctggatttgggggggatcagggaagatgggtgggttatgagttagtttgctgggcatcttcccttttttctctgtccagctcccaggtgtttgaggctttttcctgcctccaggtgctccaaatgtgggggctgccctttctctatctgggtttcagcctctccagctcctgcaagacagtgctgttggatctctgtagtgcctcttggtttggccactctgggatttgtgagtcatagtcttcagtttggtgctttttcctactccatcctgccttctgctattcatgccccattgcaagaacaggcattcttccttcccgtataaacttgcaacctggttccacccattctcctctcttcttctccagatagtcgtagagatcgctgcctcccaaaatagccccatttgattccttaggacaggcaggaaactcgctgcccgaccctgcctgagtctccgtttccttagctggagagactgtccttgctctagaaaccaaccaccggaaattcacctccatccctatcacttcctggggtagttctttctgaccattgggtttgcttcttgggtgtctggctctgcatacagttagaagctctttaaataccttttaacttcagggtttttgtggatgtgtatatggtggagggagagagtgtataccagtgagcatgagagcaagagttactatttatcacaactggtgtccaggggtggctaaagattatcgacttctagagttgtgtttttcaactttttttttaaatcttagtgagcagtaataaatacattgtaactctcaagcacacataaatgtcatctgaaacacgtttgaaaaatatatgcgatttatttgttttttgagatggagtcttgtgctgtcacccagggtgcagtgcagtggtgcaatctcggctcactgcaaccacggcctcctgggttcaaacaattctcctgcctcagcctcctgagtagttgggactacaggtgtgcgccaccacgcccggctaatttttttgtatttttagtagagaaggggtttcaccctgttggccaagctggtctcaaactcctgacctcaagcagtccggcctgccttggcccccacgaagtgctgggattacaggcattagccactgcgcctggccgaaaactatatactcttatattctgatatttcctgtgcaatgtgatattttccatacaattttatttcatttttcaaaaattgctggatacaaagcactgaattaatttcatatgtattttatttaaacaatcctctctcctccattacagtatacatttcatggagacaggaattccatgttattctacttcctataattgatgcttaatacctattgtcaactgattcttttctctgtgcagatcctctggagaaatattttgttctgtgccaagaaacagtttcattcaacggttaaggtgacttgtgtcactgatctgatttccttcttttacattaactatcaaaaatctcagacttattaataaagacatgtcttcacaggatacatctttacaatggtcttatttttattttattttcctcgctctttttttttcattttaccttattcttctgtcctaaatatttaaagtttcagctgattttaaagtaaaagatgctcaatgggaaaagctcacacaaatcagagctacctaaaagtagagttggaaagtcccaaggatctttttctctgaggcaagcctctttgcttctgggtgcttgccctgcagactggcttatgaagaggtcaccatcttttcagattccaggggcctgtaatgttcataccactgcagtattcgtattacacactgtaataatctggaataataagatcgtaggcactctttcttgccctcacatgtggatctgccttctccttttaaacagccatgtaacgttccctttctcacctactttgaatttttatattcttgctgctctaaggttttttttttggagcaaggaaagcaatttaaaacataaaatttactttcaaaagaagagtagagataattaaccagcccttgccacctaactcaatataatcccctagtaactcctcttggagccaccaggttccctgggagtggaattgcctgtggaaaggcctgtgtgggttctgagcttgggaaatggtgacggagccctctctctagcctctgggaggtgtcaaataatggatgagagtgaccttggactggcaagagcaggtcagtgcaagtgacatgggtttcttagatactcctcagctcagtgtgggtctcccgagactcagttctgcctgctgacttgctcattcatttccattgcagggctgcagttgggtcatgcctggttttttggcctcccaatgtctcttaattaacttaatattacttggtaatactaaagcaatgatgaattatgtgcatggagtcattaatcttctgtgtaaatatctcaaacgctgtgtcttaattatagactccatacttaaaatattttaaagcttctattcatatatttacttagaaaggtatgatccgtgtttctatggtgtcggcacactcagtgggaaaatggtgtccatacattggagacgttcgtatgaaagagtagtttctctgatgagatgagtgctgcctgttctccactgacccacagacattcttagccttagcaatgaatggagttggggtaagattgggcctggggatctgggccctctttcaccttctgactgttctgtctatagcaaaccatagagagtttttctggacagtccaggaaggtgtaagagcagctttagatgaggcagctgtctccctcatagcagagccagccctaagccagggcagggcctcctccgggaagaattgtgcacctccttcagggtcatcagtgagttaggtacattgtgagtatactaacttagtatttagcagttactctgcaccgggcaccatgctgttcctgggtggtggctggtggctggggcagggcagtgagtgttacatagactagacacagcagtaatagccaatgttccatgagaacttgccatggggtttgccacacgaagacactggctcttgtttacataggctgcctcatttgcacttaccaacaaacctgggtagcttctggtgtctgtattctcattttacagtgaagaagctgcagtgaggaggggtaaagtcacttgcccaagtctgcatagctaataagtggcagagccagaacctgagcccactgtccaaggtgaaggtgcttcctagcatggtggccacctctaggtaggagctcagctgtgccacccactgggacagatacactcccaacagctgtgattgggtagggtggctccacctcccagatgggtcctcggtttgctgagtgttggttggataacttgactaactttctcagcagtcctttgagcagctgaggtcatacttagatgtgacttacgtgagacaacagaggagtccaggtgagagctggcaggcatgggaccagggtggagttgtagttttccccaccaggtgggtggagccaggtctcttcaaaccagagggcacaattgctgtttgtattgttcacgttgactgtagcaaaaataactcagtgcctgtgaacctcatctgtgaaatgtaaataaccccttctctgcctatttgttttttgagacggagtcttgctctgttgtgtaggccagagttcaagaccagcctgaccaacatggtgaaaccctgtctctactaaaaatacaaaaattctccacctatcttactctgtagcttgggaaatcaccgagataagaggttggaaagtgataactgtccaggcatgcaagtagtatgtttataggaacatgactgagcaacagggaaatgagatttctctctctctctctttttttttttttggagatggagtctcgctctgtcaaccaggctacagtgcagtggcacaatctcggctcactgcaacttccgcctcctgggttcaagtgattctcctgtgtcagcctcctgagtagatgggactacaggtgcatgccaccatgcccagctaattttttgtatttttagtagagatggggtttcaccatgttagctaggatggcctccatctcctgacctcatgatccacccacctcagcctcccaaagtgctgggattacaggtgtgagccaccgcgcccggctgagatttcatttttaactcagacgtcaatcaacgtagccatatacagatttgaaaagcttttctttatctctgttaatggagaaaaagaatgactgctttcttgtcaaaatgaaagtgttcagttttaaacttaaccagttcctgccattttgaaatgttcactcatttcttacttttttttttttttttttttttgacacagagtctcgctctcacccaggttggagtgcagcagtgctatctcggctcactgcaacctctgcctcccgggttcaaacaattctcatgcctcagcctcccaagtagctgggattacagactcgtgccaccatactcagctaatttttgtatttttagtagagataggtttcaccgtgtttggccaggctggtcttgaactcatgatctcaggtgatccacctgcttcggcctcccaaagtgctgggtttacagccgtgagccactgtgcccagccaccatttcttactttttggcaaaggaagtagacatattggagggttgacctgaactccatagattcccagggagacagtgtatgactttgatcagcccatgtagggcacattcccattgccatccaattttacctgagccattgggatgggatgcaaaggcctgacatggtttagaaataaagcataactctgcagtgccaactaggatggggtaaatgggattctggcctgggtgacaactaagacaagattgctggcccaggtgctgagaaatgtagcccgagataatggttctgtttctccttttgtgtagagatgggatcttggaatctagtgaggtgaagtacccagctctctgctttggtactgtgaggggattctgcagaggtagatggaatatggtttttgtcctcaaggcactgacaagctgcaaatgatacgagacagtgtatcaataggttcaccttcccaacccttctctgctcttgtacttggttggtgctcaattgtttgttgatatgatttaccttcatgatgacatgtcaaaacatgtgatataatttttagctctggatggcaaacagtttcaacttggatgccaactctacccagtgggtgctgcctgaatggcaaaacatgtgacactgcctcagggtgccaggagaaagagtgccgtctgatgaccagtgggaatgtctgttatggccgggggatgggggttagaagcagcaggcatgtggtggtcattggttcatcctaagtacattaggctttcaaaaggggaaaaatgatgctcagaggaaatgaaactccttagtcttcccttaaagggtgaagcaggatttagacaaacaggagtgctttcagtcttggaaaagagcagacgtgaagaccgtaccttccagtgagtatgcagatatgtgggaggctgtgggagctgagggactggaggcacgtggaggaggaaggggcatcaggaggggcaggggcactgtcctcgctggacccatgacagacgtcagttggttgttggtaggttgagtgtagacagattgcagaggtcctcggggatgccagatggaggaatttagatgtgatgcagtcctgtgcttctcaagaagccttcccagatgctccggacacgattagctgctccatcctctccgccccaaaggagactcctagtactctgcttgagcttggattcttgtctgctgtcctgaaatgtttatatattatctgccatcctccttgaggatatgaacagtgttgtagccatctttgaatccccagtgctcaggatcatgcctggtatggagcagataaccagtgagtggtgttgaattgagctgaaatagggtccctgaactgccaggcgagatgggatggaagtgggcagtgccttagaggtgaagctgggtgcggaagtgggaggctgccaagcatagaatgtaccctctgccaagggagctcagagtccatgtccctgggatgcacgggatgggaaggaaggcaagtctgaagcgtcaagtttacaagagtgtgcacagcacaggaaaccagttgaaattgaagatggcaacagagaacggaaaagattgaaggagggaatttggaaagctgagcctagatgaattcccagaggcagtgacttatagggctcggaggccctgtgtatagggaaccaccgctgaacctgtgggtcagagggagtcatcaaagatgttgtctcttgagaaatgaggagctactgaagattctctctctcagatacctcaacattttagagacatggagtgatcctacagcccattgtattaatatttaggtgggactccttcatttgcaggtgacaaaaactgaacccaaactagcttaatttggtggcttttataactgaaaagcccaaatggggaggggaggggagagaagggaatttttgacttcaggctcaacttgatccagggatgcatacagtggcctcagggccaggtgcctgcttctgagtttcgctggctggctggctgactggcacactttctcttcattttttggcttggcttcccttggtgggtgttagctcttcatctctatgtccccctggcaactctaggcttgtggtctctcagggctgaatccagccaacaaaagaacttcttacctagttaccccagggaaagctcccagacttgctctcttcggacccggttggtgtgggttggagcttatgcctatccccgaaccaataaccttggctgcatgccaactcttattgcccctgggatgagagcaggaatggagcagttcctgggggaaggtcagggtgctgttacccttggagttttgctgggtggcaaggccatcattactgccccatccaggctaactgttgtagtcttggcagcaaagcagaagctgcctttgctctgccggtgaggaggagagctccctgccagcctctgccgccccaggcatgctgctgccctcttcccacagaccgcatgtccttgaagctgggctccgtagagtggtccaccaggtcaccctgctggccacctccatttgtcatccctgggcacattctagacagcatcttgggccagggccttgccccacctgggtgattgtggggtcactgaactgtcgtgggatctcaggagaaacctcttcagagagtctgcatccacagggagaagtgtattcacacttcccacaggctggggagctgtctcacctatccttagtcagggcgagccttccattgtgaggtgctttatagtttgcacagctctatccaacttgttacttaatctggcttttaccataacactggtgggcaaggcaaagcaagaatgattgtccctgttttatggatgaaagaactgggaatcaggaggggtaaatgtctcaaacggggcaacacagctgtcgagactagcattagacttgggggacacaaatgtcacataaaatgtgtacttttaaaccgaaggtgaagaaagatgagggcaaacagactactgtagccagtttcttcatgtaaatgtggtgttaaattacccattgttgttcctctaagtgcatacttcattaatacctgcaggggaaaaaatgacctctatttacagccaagcatctctgagccgacgcctgcctgcccaccagcctcctgtggtttacccaccaaaattttactagaggttgaatcggcttgtagaagctgtgtgatagcgctgcggctcccctgggtcacctcctgaaacgtgtagggtcgtgagtgggagggtgtctcagcaagcccagcctgaatgtgcacgatggcctcaatcgacccagccacttgaaaaagcagccgctgctctcggttcttgctgttcttgcttggtcagctcttccctggggtctctgcgccctcacagagcctccctgtgaagcctgtccttggagactttgctcaccaggtcatagacaattgttgttttccaactggaagagatcatctgatttagtctgttcatttcacacatgagaaacgaagaccaaaccccgtaccgtggcacctggggccctttgtgtctgccctccactgtgtccctgcagcctgtcccttcccttcccacctgtcctcataccttgtgcttcagccatgtggactgctcttcgccctgaacagcttgccttcgtgcaggctcctcttctggatggaacaccctgcctggagcagggagggccatgatgagggagcaggtggctgtgctgagcctttccctgacatgcactcatggatgttttcctggaacagagcaaaaccagggggcgctggtatcatagaacttcttagtgggaagggacatttaataatagttggtcaaaacctctcattttgcccatttatttattcatttataaatgcggaatatctatttttgtgacaggccttgggaatgcaatgatgcatgaaatagaaatgatctctggctttaaaggaatgataatttattaggggagacaaatattaaagaggcaatttttaaaaattgacaaatagctacataattagggtgtacaacatgatgttttgatatatgcatacactgcggaatggctaaattaaactaattaacatatctattacctcacatgcttatttttttgtggtgagaaaatttaaaatgcagtcttagcaattttcaagtatgcaatacattgttgtaactatagccactatgttgtacaatagatctcctgaacttactctttctagcttttgtatactttgaaattttttatatgttgatcaacatctccccaatcttcctgacccccacctctggtaatcatcattcttctctctgcttctgtgcgttcagtgtttttagactcctcatataagtgagatcatgcagtatttgcctttctgtgcctggcttatttagcttagcatagtgtcctctaggttcacccatgttattgcaaatgacaggatttccttctttttaaaggctaaatagtatttcattgtgtatctataccacattttctttacccattcatccattgatgaacatggaggttaattccatgtcttagctattgtgaataatgttatgaagaacatgggcgtggcagacatttctttgacatactgatttcatttcctttgtatatacattcccagaagtgggatcactgcattatatggtagttccactcttaattttttgaggaccctctgtaactgttttccatagtggcagtactaatttacactcctatcaacagtgtacaaagcttccctcttctccatatctttgccaacacttatcacttgtctttttgacaatagccattccaatgaatgtgaggtgatggctcattgtggttttaatttatatttccttgatgattagtgatgttgagcactttttcatgtatcttttggctatttgtatgtcttcttttgagaaatgtccgttcaggtcctttgcccattttaaagtcagattgttttcttgctattgagttgtttgagttccttatctatttttgatattaaccctttatcagatgaatggtttaaaaatattttctcccatttcataggttgtctctttattctggtggttttccctttgttgtgtgtaagcgttttagttagatgccatcccatatgtttattttggcttatgttgcctgtgcttacagactcatatctcaaaaatctttgccctgtctaatgtcaagaagcttttactctgtttttctgtagtactttcactgttttaggtcttaatgtttaagtctttgatccattttgagctgatttttgtatatggggtgagagaagggtctgatttcattcctctgcatgtggatgtccagttttaccgtaccccttattgaagagactgtcctttccccactctgtattcttggcacctctgtcaaagatcagttgaccataaatgcctggatttatttcttggctttctgttaaagaggtaattttttaaaatttaaatttctattgtgaattacggctgtggaaaagtataatgggctttgacagcatgtaacagcaggctctaattttgtctgggaggtcagtaaaggttttgctgagaaagtgtcatttaagctgagccttgaagggcaagcagagtgtagtctgatgagaaagagggttggggagactgttttagaaagaagggaacaggatgtggaatggttccactgtggcccagggccacagcatgaatcagtggctgagttgggactagcagaaatcagatctatggctccaagccctgtgttccttgcattcaaccccgctgggtgcgtttttggccctgtatcacagagctctatgcttattcatctaaagagggaagttcatgtccatggggcaggcacccttggtggataaagcagggacggcaaagacatggaggtgggaaggtggctggcatgtgtgggagggagcaggttggcccatgacttggagtgaagcactctgacagaggagaggtgggaaagttggaagaggaatctaggcaaggatgaaaggatgagatccttaaccaagaagctgcaggttgggatagcaggggaggccaggtgagatattgagatcagctgttgtcctagcagtttgactctttatttcaggcttgttctaaaaagggtttatggtaacttagatacatacatatgtatcctgttttttgtttttgttttttaaatacatatgctaggatcataaaacctcatgctgtaatagcctctacatgtctagatctatagctttattcctttcggtttttttcttctctgctttctagtagcacctatgagtgccttacatatgtctgatgctacagttaaagacacaaagagagggcccctttcaatagagaatccaggactgcagggcacagaaggaatggaaggtgtcagtgggagagggggacttctggcagagtataagccagaaagccttcccaaagccttggggcacatgggtggaagagcaaaacagagaagtgactcttacctggctgcatcaagcctctgttcaccttttgacagcagcttgggagctctgtgaggacagggttctggctttgctgagaaggatgcaggtgctcggggatagatggatagacagatggacaagtattcatgccacagcactaataagaggattcttaaaataggaaaggaaagtaccaagtctaatgaaggattttggcatctcccacctcctgctagttgacagtttctgtttctcaagattctgtacagcattaactggtttggagattattaactagtttagagactactgatttagagcctctcctgttggtgaaatttcactgtttaaagaagacacatcaggttttagaattagatttcagcctttgtttctctagtggcttgagttctcgtgggcggggtagggggagggagtggggggacatccgtccatatacagggtagtttctggacgttgttttctaaaggaaggtttgactggccctgcctactcaggatctcctgccagggagaagaaatccctgctggtgggtgactgagtgccacaggtgtgactctgcctggcacacagagggggatgagatgcaagaatcatttactctttccctgtacctggggaagggctgttaaggtacagctcctgctcaggccttttataccagggacgcctcatttcatgtatggttctagagggttcctgctggccccttcttctgccatcccagtctttcatccttgacagtgcttcttcctctgtgcttccatcagtcgtggccacagacctcagtgtcctctatgtgtcacctctcacctagctgttttggctgggcccacagtcccaccttgcctgttaggaacctgactttcttgttggcttccttttcaaattgttaattcaacattcttttctcaaatgaacaatccttttgtaaggcgaataattatcccacttctcctgaacgacgttttgcaagatttaaaaataatacttcatttgttgaatgtggagggatacctgtttcataggattcctttttagtggcaggattgaggaccgggatgacattggcttctagacaaactggtctgcctgctctccaggctgtgattgttcagttggcatcatggtagaatctctgtaataaagaattgcattaaaggaagtttgtatttcttatgaagaatcccatcaaataattcactaaggattttggaaagagaaaccaaattctttaaaaagcagggagagggcaaaggagaaggaaaaagaacgttaaacagttcatttatactaatggcccttgtgttattgtggcaaaatttcttctaaataaaagtcagagaggaaaaacaagctttgtttgggaggtgtactgtctgttctctgccttgtttttctgctctgaagtatagtgtgctgtcttgacgtaggtatgtaactgctatgaatattgatggcagcaaaagcttttttttttctctctggcctagtaaataaagcagcaaggataaaaagggatgaattgtaaaatcagtgtgctgtttttagcttctctggttcccttagaactcttaagtctcaaacatattgacaatctgcctttggtggtcagggtctgatgtgagcactgtgggttggcattttcagggatttttgcctctggttgaagtaacagagttcctttttctttgagctttcagagttaatgttatggcttcattgaggccttcctgtatctttccctctatccagtggcaatgctggtccctgctcctcagaataccgcagtggcctgagtgtgtgatcgttcctccagcagccacgcctcgcatgcctcccgagcaagcactcctctgggggatatggcagggaatggggcaacggggaatctggacagtaagcaaggaagggcatcctcgtagctctgagcgtggcatttcatgtagctgtatgaagggcatgggggaagaaggcatgggggcatgggatgagcctggctaagaacaggactggtctgaagtctagagggggcatgagtatagaggttggagatgagctaggctttctaaattaaattataaacacactgatgctggctaactctcaaaacacacacacacacacacacacacacacacacaattcgttcactagactgttataatggtgttctgaggagcaaagggagctttggagggcaagtgtttagaaatgacaggaaccacaacagccctgtccttggaaggaagccctgttatatgaccagtgaagagtggagaatgggggcaaagactgggatgcatggccatggctgcatggtggtcaagagggaggatacctgtggcacgacaaagggatgttctgcctggcacggccggtgacagaggggaagcgattctggcagcagacagccggagcccaggggcagcacaggcaaggcttccatttaaatgcacaagggtgttggggatactgcaagcaaacatttaataggtgacggttcctcaaagggtcaggcttatgggaatcatcctaaaatttgtgtttttaaaaatgtttctgaatataaagtgttctcttcagaaacataaaatttattttcaaatacacatttgcctattgcataaaaatatataatagtgataatatatagcaaagtgctttttttccccctggaatccgttgtgaaaaggcaggggtggcctgatgggagggctgaagatagagaatcgctcttgtcagttactacttttgtgactcttgagaaattctctgtgtgtacattcaaaacttccccctccacacacctcccccccacaccaacagactaaatgacaggtaccatagtggggacatttttctggctcctggtacagtgcctgtcatttagaagtggtgttcacgtgtttcctgagcctattttattttgacctcttgccctaggcattttaatgagtgaatttcatgacctccatttctctaaggtattggtaacttttcgggtcccactgatattagtataggactctatagttcatattggaaagttacagttgctgatgatactttgttatttaagtagcttcatgccgaggaatgcctcttgcaaagttaattacacacatctctgttggtccatgtttctattgaaactgaagctgtataaagaaaacatttgtaaaagaggaaggagtcaaagtttttagacttgctgattggtatgttttccacagctcatggagttgcatgggttggaactggaaaggttctacgagtcatttagcccgtgagcagcacctgtgaggtctgtggcagtcagatgggcatggctgctgggatggatactagaggaaaggtcagaggctctgcctaggtttcctgggaaagtgcatgatgacctgtcacaagttcagccgggagaggcggcatgccaataagcaggcagggtgtttgccatcctgaatttacttcccttattgtgtggatgcaaaaacttatatccagaggaggagaaggacttgtccaaggttaccttgctactcagtgacaaagctgactgtgacttcgaactcagacataaacccaagaggaagagagggtcaaaacagatgcatcttcattttttccagaggatgaatttcttctgttcaaagacaccattggaatctttgttgtacccttgtgcttttctgggcctgatttggcaacctcaggaggaaagcatgctgcgttttgcaaatgtgtgcaaataacaaacatgcctgttatgtcctaggcagactcatcacacgcattggggcagttggcaaaatgcagtcatgcagcctggaacgaaaagtgttgcacacgtagttgcttatgagaaattcagtgttagaatgtaaatgccttcctggcccaggggcagtgtaattgttccatttctcataatgaaactttgtttggagggaaatgcttatatgtctaaggtgttgattctaatctctgttcctttttctgtctcctcttcctcccctgcccctgcttttttggtatgtttctttgtttttcttcacaggaaaaagtagaatatgccttcctgattatttttacagtcgagacatttttgaagattatagcgtatggattattgctacatcctaatgcttatgttaggaatggatggaatttactggattttgttatagtaatagtagggtaagtctcttttactttggggaaatgttgatttggaaaatgggaggtggaggttggggggggtggtggtaacaaaacagtctttttagggaatgtggttgctcttttatgccagctgttgcaccagaacctctcaggagttcttttaaggctggtgatgctgctgtcagtctctgggcagatactagtttgaaattctctcgttgttactcccgtttttagtaacatgttatagaagggagtctgaactcctaatatgagaggctttacctaacacggtcttggatctccagaaatagaccaaccctgttggtgattagagtcaaatgagtagagcttttaatacttagtgccaatgttaagttaaaaaaagtaaaaagtaataaaaccttcatagcagtaaggtactctgctatttaacatcccttgagcaaagctattaattttcttttttttttttttttttttttgctgacttgcgggagaaactctggcatactactgttccattttaaataatgaaacaagtgtctggataatgtcacgtatctggcataaaatgaaataagctagaaaatgcagagaagcaggtgttccaccaaaatcctgttgcaggaagaagacatcagtagttttagtgaaaggagaatgttaaaataaaaaatagtggcctgtgttattttagtccttccacacctggaaatgttgccaggaagagaaaaatgaatccatgttacaggaatgctgggtctttggaccaaatacccatgtaggaagataagatatatcctttttcccagtcttagttatgctagctgtaaagtgagttgctcctcaaattatgtttctgtaaatagcctctctgttttcatcttcatgacttcagtgaactgccttttgcagttgagcaaggtgatttttcttgtggattatccttttatcatgaatcttttgccttttcattggagactaattctgctgggtattgggagagtggaattggttgtgggccttcctaggtcctttcaacctaggaagttaatatgagatcctaattgcccagtgggacaattagacttgtgggaaacaagttagcttttcaaaccgcccccgccgccaatacattgtcatttaaggcatcattgcaaaagaagtgtaccaaaatgaacaggtagcagatatgtgccgtactttcctgtatttggtggactctgtcgaggaatggcaagccgaagccttgcaggtatgttggttctgggataatctggctgtgcctcttctgccactggactttttgttcagctaggaatggagatgcttagccccatttcttgcgtcaccgtgctatgatcacctcatatttctgcctggagacatttttcacactacagcacagcacaaggacagggaaccaagtggagcatggtggtcttattgagttaaggagacagacaagagtttggggaggcagaataggggaggggagggagctatttagagaaagagcttcataaatatgccttagagtactcttcagttttggctgagggctaagctacgcctacacggagttgtgagtccatgaggccaggaaagaccactactagggaaaagagaaagatcagggagctgtaaaatgaataataaccagggctcacaaaggactggaaggcattcaaattctgactaattagggtggaaagacctcattgaacaccctggactgtcagtagagaccccacagggccactggtagtagtgctaaactggctctagagcaggggctggcaaactgtggccaatgggctaagtcctagcccatctagcctgccacctatttttataaataaagttttattgtaacatggccacactcatttgtttacatagttcagtttgagtagtttaggtctacaaaacctaaaatatttaaatatttactatttggccttttacagaaaaagtttgccaattgctgctctagagtacagagactacctgaaatccttgcttacaatgtttgaaaagaagtctgaaaagaagcaaactaggctgggcatggtggctcatgcctataatcccagcactttgggaggccgaggtgggtggatcacctgaggtcgggagttcaagaccagcatggccaacatggtgaaaccccctgtctactaaaaatgcaaatattatctgggtgtggtggcgcatgcctgtaatcccggctacatgggaggctgaggcaagagaatcgcttgaacctgggaggcaggggttgcagtgagccaaaaccatgccactgcactccaacctgggtgacagagtgagactccatttcaaaaaaaaaagcaaactgatatgctaactgaactgcctgccagaacataactcaacattctttaaaggaagacaacaaaatccagacactgaacatatgaagaaatgtgacccataaccaggaggaaactccgtcagtagaaacagatcctgaaatgacagagatgatggaattagagaaggacttcacaaagctttaaaaactgctgttataaatttatggacttaaagggatacctgattatagtaaggaaagatgggacaatataaaaaaaaacaaatggaactttaagagatgaaaaatatatccaaaatgaaaaattctctggtttggcttaacctcagcttaaacactatagaaggaaaaaatatcagggaatttgaacatatggcaataacatgaagaataatgattgaggagaaaatgaatactgcctctgtggcctgtgggggaataacaagtggtctaacatatatatatatttggagcctcagaaggagaggagagaaagaggagacagaaaaaaaattttgaagaaacagctccagattttccaaatgtgatgaaaaatgaaactcacaagaagctcagcaaagcctgagcaaaataaacatgaaaaaagccacatcaagcacatcataattgtaatcaaattgttaaaaaccaaagataaggagaaaaccttaaaacagagaaaagaaaatctcagactatttgtcaacaactatgcaagccagaagacaatagagagacatctttaaagtactggggaaaaatgtcaacctaggattctcactcagtaaaatatctttcagagttaaagtcaaaatcaaaattttttcagacattctagagtttcagaattcatgactaatagacctgtacctcaatcagtgttaaagacagttcctcagggctgaaggaaaatgacacgaggtagaaaagtggatctacacagaaagaaatgaagagtaccagaaagtggctctacacaaaaaagaatgaagagtaccagaaagggtaaatacgtgggtacatatacagatatttctcccctcgtttaaaaatttctttaaaggtaattatttaaagcaaaaataataacagtgtattgtggtgtctatagcttctatagaaataaagtacatgacaatggtagcatgaagaataggaacagggaaatagccatatggtcttgtgatgtacttatacagtagttggaatgattaaatattatctgaagatagactgtgatacctttaagatgtatattgtaaaccctagagtatggattggtgagctacaacctgtagaccaaatctagtttgagcctttttttcccccaccattgacaaagtattttatttactgcctactttggcaaataaagcttcattgtaattcagccacattcagtcatgcctatggctatttggtattataatggcaaagttgggtagttgtgacaaaccctatggcctgcagattctaaaatatttactattcggcactttatagaaaatgtttactgacacttgccttagagaagccactaaaaaagaaaatcccaggtctatctaataagcctattgtagagattaaatggaatttaaaaaaaacccctaaatccaaaacaggcaaggaagaagaaaaaaggaacaaaggacaggacaaatagaaaacaaacggcaagttgctagatttaaacctaggtaaatccttattaaaatcattatcatgaagaaaggataatggcctttctttgtgtccatgtgttctcatcatttagctcctacttataagtgagaacgtgtggtatttggttttttgttcctgcgttagtttgctaaggataatggcctccagctccatccacgtgcccacaaaagaaatgatcttgtccttttttatgactgcatagtattccttggtgtatgtgtatcacattttctttatccaatctgtattgatgggcatgtaggttgattccatgtctttgctattgtgaatagtgccacagtgaacattaacatgcatgtgtctttatggtagaatggtttatttttctctgggtgtgtacccagtaatgggatttctgggtcaagtggtagttctgttgttagctctttgaggaattgatacactgctttccacaatggatgaactagttcacactcccaccaacagtgtataagcattcccttttctctgcaacctcgtcagcatctgttattttttgactttttaagagtagccattttaactggtgtgaaatggtatctcgtggttttgatttgcacttctctaacgatcagtaatatgaactttttaaaatatgcttcttgaccacatgtatgtcttttgaatagtatctcttcatgtcctttgctgactttttaatgggatttttctttttttcttgagaagttgtttgagttccttatagatgttggatattagacctttgtctctcattctgtaggttgtctttttaccctgtttcttttgttgtgcagaagctcttaagtttaattaggcccatatgtcaggttttgcttttgttgtgattgcttttggcatcttagtcatgaaatccttgctcattcctatgtccagaatggtattgcctaggttgtcttccagggttttttatagttttgggttttacatttaagtctttaatccatcttgagttgatttttgtatatagtataagaaaagggtccagtttcaatcttgtgcatatggcttgccagttatcccagcatggtttattgaatagggagtcctttccccattgcttgtttttgtcacctttgtcgaagatcagatggtcgtaggtgtgtggccttatttctgggctctctgctatgttctgttggtctgtgtgtctgtttttgtatgagcaccatgctgttttggttactgcagccctgtattataatttgaagtcaagtagtgtgacacttccagctttgttgttttgcttaggattgccttggccatccaggctccttttttgttccatatgaattaaaaaaattttttttctagttatgtgaagaatgtcattggtggtttgataggaataacattgaatctgtaaattgctttgggcagtatggctaattaattgatattgagtcttcctatttgtgagcatggtatgtttttccatttgtttgtgtcatgtctgatttctttgagcagtgtaaaaccatgaaatttatagtagaaaatattggataaaatctttatgacctcagtgtagccagagatgtctcgggacacaaaaagctccagccatgaaacagtaattgaaaatgttgactttatcaaaatttaaaacttttcttcaaaagacagtgtgaagacaatgaaaaagcaaggcacagattgtgaaaaatattcacaatacatacacttgtattcagaatatataaagaactcttacaacccaatagtaagaagacaacccaataaacaaataggtaaaagatttgaacagatcttcacaaaagaagatatgtgaatcatcaacaaacatctgaaaagatgctcaacattgttagtaattagagaaatgcaaattaaaactacagtgacagtactgcatacccactagtattactaaatgtaaaaagactgaacataccaagtcttaaccaaaatatggaacaactggaactctcatacaccacttgtagaaatggaaaatggtataatcactttggaaaaaatgcgcccatttcttacagtgttaaacatagacttaccatatgaccatattaccagttctactcttaggtgtttatccaagaaaaatgaaaacacatgtccccaaaaaaactttattcataatagagaaaaactggaagcaacccatatatccctcaacgggcgaatggataaactcattgtgatgtatttgtgtaatgggatattacagaacaacaaaaagaaatgaactgctgataaaacaacgtggatgagtgtcagaaacattatggtgagcaaaagaagatgagccaggagaacatactatgtgattccatttatatgagttctagaaaaagaaaaaaaaaaactctaccgataaacagccaatcactggatactcaaggctgagcttcaagggaagctctgtacaaggctgtgcaaaaggggcacaagagaatcatttaaaatgttgaaaccttccctatcttgatcatggtgtttgttgcttaggcttatgcatttttcaaaacccattgtacactttaaatgagtgtgttttattatagataaattaaactgcaatataaagtgatttaaaatgcaaaaaaaaggaaactgaagtagaactggactctaagaaaaacttcagaacatcagattattttttatctaaaatatgtatgaaattggagtcaaagaacagaagaaaggttttaaaaaagaaaaggaagaattatgatgtcttcatttgaatcaaattcctactcactacagtttccaactacagtctgtatctcaatccactggatttttccattccaacagtgacctattgcttttgtcaagattcccaatagtcaagacattaagaaagtaattgatatttctaaaatgttaactgttaatgtgaccacaagaggactcagtgtgtctgccagagctgaagttattcctttagagaaaagtttgatctaagccaactcttatcccatgcctccaaatttcaataaagatatatttcaagcattcaggctctattacttaagctttttttgaagaacgtgaaggcttgtatgtgactcctcattctggtgcttctgactttagtcagtttagacagctccttgtcttttttctcccaccttggggtaaacttttaataacaatctagagtcagttactcctttctcatcctgtccttatctcttcaggcccgtggcactttttttttttttgagaggcgtggtggtgaggaacagaatcacggaatattagagtggaaaggtcattctctgagtcgttaaatccagttttgtcattttatagagaggagaactgaggcccagagaaggagagggactttcctaatatctcataactcttaggagtggaaaccagccccggccccttgcagccctgcactgtgtgggaacacagcctgcttctctctctgacttggcctctttggtggcaagagagagacatttttcatgtgttttcaaggacattgctgaagaacaaggaataaagggaccatgatgtatatgttgcaaaacatggatacttgaaagcagtcttcagtcactacctgcataaattactttgctaaccctttggggtgaaaattcctgtggcttgcacatttcagaagagtttgaggttttctttctttctttttctttgtttttctgaagctatgaatttgttttggaggagagacttttcactttagccttgctgcagggatttacagtaatcttttaaaaactatgctgaagagagagaagcctgtcataaatttgatctatttcctcagtcataactagggagagctcaccatctgaagctttgtaaaggtagagaccgggcttgttttccctcctggctgggttcgttgctaattgctgtactgttattaaaacaaagggctgatctataaatgccccagaactacacaactatacccaatcagggctgtaatcagaccacccgatgttttatggactcggtgtcttggcaatccagaggcacgccagtgggggcagtttctgctttgtctgctcattaaactttggacaccttttctttgttgctgggccagtcattcccacaatctgattggccagagttgatgctgtttgaaatgggcaaattttatacttactctgaaaaacgagcaataattccaaagagtatttgtttaaaagagcaaaagtcactgttaaatgagcagattgcctgaaaatagatttatctgaacgttctgagactaggaaaaaatttattgtggctgccaggtacaatattattcacatttcaagagagagaatgatgatattaataccttaccttaggtaactgcctttagcctttgcacagctccttagtatctgtgatttacatcctccaaatatccctatgaaggtgaaggttggggtgtgtgtgttagtgactacattgactacatataacatattaagatgtgagactttgaagtcattcattgattgattcatcagatatttttggagtacttcctatgtgtcagatactgtaataggcactagactagaacagaccacatgcacaaatgagcagaacagactaaaactccttgctgttacagaacctgtgttctagtggggtccacatgcctgtgtttacatgtgttgctgctagttgtgtgaccttgggcaagctacttattcctatcgagtttgttttctcgtgtgtaacatggtgttcataattgctgctgcataacattttgtgagaattaatgtgacaatgtatgtgcagtgcttagcacatagcaagtgctcatgaatggtagccaccaagatggctgttgtcattttagtttgcagcagttccacttgtcatcattgagttcccagggagtcccctcttctttgggaacagacttgctctctgttgctccattgcggtaaaaacagatgaggttaatccctgtcccaatcattttggagatggcgtcgtttgtattccaattccacagcccagttcttgtctttgtcttccttttatttaagcagcagccacacagaattagcccttttcaaaaataaataagattatcatcctgttttgcgtccctggggtaacagactctaacatttctttctctttctcttctttcagattgtttagtgtaattttggaacaattaaccaaagaaacagaaggcgggaaccactcaagcggcaaatctggaggctttgatgtcaaagccctccgtgcctttcgagtgttgcgaccacttcgactagtgtcaggagtgcccagtaagcacttattgtttcctagagtcaggagtgtgctggttttttcttccaggtgggtttcagaatcactggtgctttgaggtgagttgctctgtgccagccaggggtcagcagatgaccatggcctccttcacagttgacaggacactttggcttgcactgtcacgttggatccccatgacagaatgacaggcagttattgtcattctgattttgtggacgaaagaatcttctcttgcagaaagacaaggtgaggtgttggggtgagaccttgggttcaggcctttaattccagtctatttttcctctctggcaacatgctgccatccacgcctccactcccaggcctgcccctctgaaagtggtgggtttgtggatgagggtgttggagtacttagctgcgtgcctttttttttttccccaaatggggagcatcagagggatggactcctggaaactctgattagatcctctactatcaggaactgtgctacccagctctgggggaagggatgaatgcttcttacctggtgacagggcacaggagtacctgccttgaaggctgttgtgagaactgagtgagataatggagggagagcccctaacaggatgtctggagcacagaggctctcagtgggtgagagagagagttttagccgttaggccctaccataccactcagtgccaggccccagtgtgcttctggctccaggcccccaggccaggttaaatcatacctgagttggaatagatgccctgtctgtgccctggccaacagctgcagcctcttatccttccataaggtgtttggggttgcctcactgggctctgcccctgataggactcctgtgttggggacttccatgggtagaagtcctaacacctttctgagggctggtgcgtctgagcaagaatatgggattgcagggtgtgcctgtttttcacaactcataaagccatcagaagaacacagatcacattttttgcctctccagaagttcttcatgaaatttttattaaatttgttggcacttagaatgcaccaaaaatcctctggaaaaaaaaatttccaaatttaacattttaaaatgtaggaagtggtgttttatgtgtacttgtttttccagatggttcatttattttcattgaaaaagatcagcacaagtcaaaaccacagaactgtgtggaatcaattgagaaaaacagaaataccttggaaatgactggctctgttaagtgtaacacgattaaatgagaagttcagtgagcaaacatgttcttccagatttagttgttatagcttaatctaatttcaaagtaaccacgacagctttttcccccaaagagcaaataacaggacagcctgtctatggtatgtgttgtgtgcagactttgggggctgtggctgtgtgcgtgtgtgcgtgcgagcttctggccagtgaaaaatccaagaactcacatagcattgtgtctgcttccttggctaatgaggtttttactaaactagtgcagtgctcctagatattgagaattagttttaaactgtatttcttcctttccccaacagacatcactgtttgaaatttgatagggagatttgtatgtaactctcccccaggtcagcagggaaaaatgtgagtctgagtcttgtatgaggacttttgagcttatatttttaaccacctaggtagggaacatcccagtctctcatcaaactcaaataggcttttgaagaaaaggatcagaggttgtcggatgtgctgtttctagtgctggttggcagccgtggcctgctgatttcttctctagtacttgaagttgttaaaaatgtccaggaatgtttgactgtttacacttatcttggaattgtttagtccctgctaaagagaatccagactgttctgtaagacataattttgtgtgcatgtgtgtatggaaatatatattcattcagtgaaaggtaaatttatttcacaaggtggtgaatcaggcatttgtggagttcttaagcacccacattaagagactgagggagaatgggcaggaaccgagaacccaccctggagaccaggccttctgacccctgtgttgacgtcccccattctctccacagccccgcgacctcagcactactgtgctgctcactgtttaacttcttaccttctctttccctgtccttccgtgttggacagggaaacatttatcaaagttcaagaccatcaaagtggaaaagaatcctaaagatcatctggtctacctgcatcttttagacaaggaaactgaggcctgttggaggtagtgactagtgtaagttctcacagctagtgagtagccagacagaaccagacccacgatctccacatttctgacccggtgttcttcccacttctgcctccttgactagagtcccatgagatccactgagatctaccgtacatgttgattatgtacaaaggagcggaatgcaataaagtatacatgttcacagtcggatacaactttatcatctcataaatgtgacaaatctgaaatacagtagttactctaaatgtaaaaaatattcacaaagcttactgccatggaatttagaagagctaactgctgggggttagttttgcatggcccattggtgtctcaagaaaaccaaaacaatgatagaaacctggccatggggattggaacgggtgtcgtcttttcctttccatgtgttccttgtaggaggtaaaaatattgaaaatcatcctaattgatcatttttgaaaaaaccatgtggacatttacatatccaaagatgtagcacccagagttttagttgtaatagaggttgtagcaaggcagggtcgtgctgagtctgaaatcctcttactgctcttccctcaccatcctctcccctgcctcctcctgtgctgcttatcacggtaaagatttgtcattattgctaagtcttctctttgcttgctgtattctggtttccgatgtaagcatctcagcttcttgcattctttctttcctgactatgtattgggaaagtgagatgatagcagaagatggaaagtttgaaggtggagagacaacagggaaggacagggaaggagaaggtaagaaggaaaagagtgagcagcacagtcgtgctgaggtcgtggggccatggagaggatgggggatgccaatgcaaggtcaggaggcctggtctccagggcaggttctggattcctgcccattctccctcagtctcttggttcctcacaaccaatcctaatcctgagtgctgcccccatccttcttttcatgacctctttttctgtcccttggcgggtagccttacccacactctggcactgagtatgactccatgggtagcttctattaggttggtgtgaacgtaattgcggtttttgccattgaaagtaatgggtctgagtctgaggatttcagactcagcaagaccctgtcttcctaagacctccatggcagcaaaagttttaaatgtaggaaataatcgtctctctctctctctctctcttttttttggagacgaagtcttgctctgtcacccagactggagttgcaacctccacctcccaggttcaagtgattcccccacctcagtctcccgagtagctgggactacaggcgcacaccgccacacccaactaatttttgtatttttggtagagatggggtttcatcatgttggccaggctggtctcgaactcctgacctcaagtgatccatctgcctcggcctcccaaagtgctgggattacaggcgtgagctacctcacaagggcagaagtaatcatttctcatgtgcctgtctctcaagaccacatttcagcttcaggacacgtctaccttaatgttacataataccaacatcatacttaacaaggctcaagtcagtctcaacctcccccttcccctcccacctccctcattcctggagaacctccctttggaatgcttagttttgttggggacactgggattttgcctcaagaccctggctcaaataactggtgtgctccataggtaccttcctctcattctgactcagttgctgagttctggtctcatcctgatcttcaccctcacctaccccagcattcttgaactacctctctgtgtgtctggcctgctgctgtcctgttggtctttctaaagcagctgccttttgctagtgatctaaagtttggcttcatgacctggattcaacacccacaaccctggctgcaatctacttttctttcgtgattttcttttccactaaccaccaatcaagactcaccaccctcaagcccatactgtgctactctcctctgtgcttttggtactctgttcttcttccctgaagttgcctctctcccatgcccacctgtggaaatccaccccacctggcctttgggctgtgcccagagagaagctgcctcaggaccctttcttcaccccattcatccctacttgtcacctgcatggaccttgggggactgaacaaaggatgatgaacatgggaataaagacaaagacaaaagagtatatttggaagaaggggtcagggggctccttgcttctagtgaacaagagccctgagcttcagagcctttcacattttactgggtaaaggagatagggagagaggggagttgttgtcggtcagcagcttgatttacagcagacttgcaagactgcattcttctaacaacaggctctagatgtcccagtagataacctcaatgagcacggtgccagggagtgattgccctcagcaaacctggcggtaggcacagtcgtgagtttgcccacatcctgcattcatgataaacagtttgctgtttgatcatatagcctccagtggaatgctgagttggtcacaatccctttggccttttcaactcccaacacctattaattttaactattgggatatttatatagcatctatgtgctaccccagggtagagttatttgtgtttaattctatgtctcctagaatataattttttgagggaaaacattttacataaaccgtcttcatattgctccaaagcaccaaaccttatgatttccacatggtagatgtttaagagattttgtcagatggatgaagaaatgcataaatgaatgatgaactttgacattgggcagtcccctccctaggccttagtttttccctctgtctagtgagggagtttgactagatgatccttaaggttccttttcagtctatctcacatccaggcttaatattaatgaaaagctttgaaatacctctttgaattttattactatgtgttctaagtaaaggaggcatggttaggaattatatatatgattcattggagtgccttcctggctcacaaacttatttttttttgtctttcctaggtttacaagttgtcctgaactccattataaaagccatggttcccctccttcacatagcccttttggtattatttgtaatcataatctatgctattataggattggaactttttattggaaaaatgcacaaaacatgtttttttgctgactcaggtgagtaatgagaattgtagctaacttaactttaaaatttttttgttttccccaaagcaactttcatggtttggggaaaatctaaaacaaaataggaaaaaaaatgcccaatataccagcacatttactgagccagttctcagtgtgagctatgttcagaatagatgagaattcagtctccctttccaccccgatttcctgtgtaatgtgtcctggcaaacaagataagagacctccaaagtaaaaacatgaggcaaaccaacagcattgtgctatctaagcctaaggaggatgctgtaagcgcaggtgcagaggaaaagaaccatggatgctgacaagaggaaatggcagattccgctaaggagggagcatttgaagggaaccttgaaggacaagcaggatcctgaggcaacgcagatggggcggtagggtgtcccgggctctggcaagggttctcaccttccgctggcttggatttcctgatgtttctgtcctgagcggtacagcctgtttgctctgtttgcagatatcgtagctgaagaggacccagctccatgtgcgttctcagggaatggacgccagtgtactgccaatggcacggaatgtaggagtggctgggttggcccgaacggaggcatcaccaactttgataactttgcctttgccatgcttactgtgtttcagtgcatcaccatggagggctggacagatgtgctctactgggtaagtaccctggggagagagtttatggagtgttctttgcttggataagtgggttttgtgagctagagccactggagaggtggctggaaaagaaaccctgaagtcagttatttgggaagggaagcagatgctgtctttaccagcagtcttcatcatcctgctcctcgagggccttagtttcagttgcaggaagctgctgcgcgatgttggcttctggctttagtcctctacttcccagtgctgcctgaagacctggtgccaagggtgcccagtggtcccctttggaggaactccaggaagccagggctatcctgattcaactcttaagagagccaaagggtcactttccaggtaaggaggctcctggactgccacaggctaaggttaatcatttatacatcaaggcaggttgctctactagatcctaaagggaagaaagggaatgtaaatcggatccctttcatgcttttcataactcagtataaccttaaacccagtgtgagtttctcccatgataatatttcccattctttagtattactataaatcatcccagcacaaaaccttagctgtcttcctttctatttgaagctacagacctctggcagaaagggtaggaatggcacgtagacttccagggctggtggacccatccagcctgccatgaaaacagttggacactctttcaaggcgagggtctgattcctcttgttcctgatagagccagaaagatttgctgtataaaaataagtgctatagcattttaacagccatttcccagggctgagtttgttagaatgcaaataaagctcacagaagtttagaaattgtttttcacggtataagagttgctggtaaagacagctaacatgtagattttgagcctaaatccaagtccaaaggggagtaaccaggattccaatcatgagttgttaaaaggaaattagtaataaagtagttctgaaatcagcagcttttagacagaaggcctgtaaattgataagtagcttctggtagtttctaaattttagatacttttcaggatttcctatactccataacttcaaagaatgtaacatataatggttataaataggtttttgctgcccttcagcagctcacaggattgtagatgtccctatatatttaatatgaggcaaagaagttatatttttatctttaatccccaaagtcagtctagtttgatcaggtttaagcatcaccaacatgttatatcttgtttttcctacttccctttctttttctgattgtcataggagtgtgagtgtgtgtgtgtgtgtatgcatgtgtgtgtgtgtgtgtatgcacatctgttatttatattcataaaacgtcttttcataaagaggaaggaggaaggagatgatattggctgagccaggggcatggcttctgtatgcaggagggccctcaggttaggtgaagcattcatttttgctattatttcctaaattgcaacttctagtcagattagttgagatctcaattccagtcttcccttgaagtttttcataaatagaaaaagcatcatcaaaatagcccaaactgatacttcccctccccaaacagtacataaaacaacattttgatttttttaaaaatcaaaatctgtgactcttctcagctttgtttttctctctattgacatggtgaattgtcagctgcagagccaacatgccttgactgatgaaaaattttatactttatgttatattccttcacatcgattctcagaattttcctgttgccaagcaagtgtaaaacctgggagtagatgattaaaggagagggaacttcaggctcctagaagcaaaagtttccgcttactttcctgagaaggtttaaatatcatctaggatgatataattactatttttattattaatatgacaatcacgtggttaatactttgacagtataattgcactctccataaattacacagcatctttattctggtggggatctcaagccattcataaactttatcccagtctgtatccctttatagaaggtctgggatcttgaagatggagacagtggcgtagagaccatggaacattccccgagttctacagcaaatggttgtggtccttgatctagaacagtggtctataaaccttttcataagggggcaaatagaaaatgtatttggccttgcaggctacatggtcacctcagcaactgttcagcccttccactatagctaggaagcagccatgggcaatacataagcaaatggatgtggctttattctaatcagacttcatttatggaccctggaatttgaattttgtatgatttttctgtgtcatgaaatattttgcttttgattttttcccccaccaactatttcaaattgtaaaaatcatttttagcttgaggccatataaaagcatacagcaagctagatttggtctgcaggtcatgctgtgggaccccctggcctagactagaacccagcactctttccttggcattcttccacctgtcagcagttgatgaatccttccagaacactagggggcagctaagtaatgtcttcccgactgttctctaagattttactctctgaaacacatcaggattgtttttaattacctgttgattgcatttattagctcatcatagagataggcaggggccaaggaaccaagccttcctaatatttcatgggccacagtcagctggaagccacaccgctgtgatacacagcagaacatccctgcccagcatggtgcctggcaccgagcaggcactcaataaacacaagggatggtcatcatccttcaagtgtaccaggcatattgcctcattagtgtagatgtgccatgtttgaatatctatttttatccacaactagggcataaaggggacatcttgggagataaaaagagattagattttaaatattgactacaagcacatttctgaatcctttaggcacttacatatggtggacaaagtctttgcgggtcattgttttgcatctagtcaagtttatattcagtcagcgttctcaagctcatttatgccttgcttctcactagtgtctggaaaatgtctggcagggtcttgagaagggaagtaaaggtgggtccaatatgtagaaaggcacacttagaacaggactatttggatgtgtgggaagtgggatcattaagttctggtggaaagaaacctatggtagagttctttgataaagtgagttccataaatataattgagctgttgtttgactcacatgtgagtgtttgttgctcacagaggcagtagggtgtagggcagggaaagagtgtttatttagcctggttgtgtgaccttgagtagttcatggaacctctctgggcttctcaagatgcagaaataaacttacatgatttaatttttcccttcaacttagaggaaattttttttccttcaattcaaagaaattgtttttaaatgcaggaaataaaaagtattggtttcaggagacagctatccagataaataatttcggtgtcttgtcttagcaccaagctcttttctcagtgcacactcctacggaggtgctggctgtcagaccttcacgggaagtactcatggtcaagctgacagtctccttcattcagggcacctaggaaatctctctgtaaccagccgagggcttgcctttttcttattgcatgctctggggtgttaaaaccagtataccaagtttccagaagtgttttcagcagctagaaaaacagccttgcattggtctataacttgagacatgaatatgcatttcaaccttttatttttattttttacatttttttgagacggagttttgctctgttgcccaggctggagtgcaatggcgtgatcttggctcactgcaacctctgcctccggggttcaagcgattctcgtgcctcagcctcccaagtagctgggattacaggtccttgctaccacgcccagctaatttttgtatttttagtagagacgggtttcaccatgttggccaggctggtctcgaactcccaaactcagggtgatccacctgccttggcctcccaaagtgttgggattgcaggcgtgagctgctgcacccggcccatttcagccttctaaaagaaggaaaactgaagctaaaaagaaaattatttcctgggcaccagatgacaccccttgatgactttgatataagttttttaaaaattagtctaaattgaagtccttcagtggaagccagtttcttcattgttgataaagaccatacaggcaaaatcccaagcagtctctattttcacgtgggtatttttgggaacagcttgcatgttctgatttttcttttgtatatggtaagatccaagaaatgcttggctctgaaaagggacttggattgagaagggttcaatgggagcaagaccgttctcagagccgaagcttgtctctcttgccccaccttctgacttagagatttggaatctccagtggactgtattcatctccagccttcccctccaggcctcaactgtcattccaagtgatacttctgatttgagcaaatgtgaatctgatgaacacctactcccaagaaattaaaagggttttaaattttttaaaggaaaattttccctcccaagtagagaagacagctgttactagagccattctctggaacaccagactgaggcctgaaggagggttggtgaagcagatggctcagcagatgacggttgctagggtcatggaagagtgaggtttcctgatgggagccctggacctgtctgccctcccgtcaccttgttgggcaccttctcccctgctgcatgcacctctgttccaacacagagggaaacaagcccaggtggggctctgtctcaggtgctgacccaggccaggcacaggccaccacaccaggcagccagttccttcttcatatatgggtttttcagtaagtttagtggtatagttgctctggatgaattaccctctgccttcctgctgaaattagtttatccaacttaattagatcaacaattgcagccacagcccaggctcattcattactctaattgccaatgtaagatgtgcagactgatatgagttctattaagcacatcaattttcatgtggccaaacaggtgtttcataagggatttaatgccctctccctagacttcagcaacagatgttaggtaattttttttaatgttcactttccctatttggcttctcgaggcaaacattgtgaaatgcacgagcctcattctgtaaagttaaaacctggagccagatcatatgcaggaaagcacatgcttaacaccctaagggcttgcacctgcaaggcaagagcgatggctctatccagactgtttgcagttctcattggctgaaaattctgggtgttgtggcagggtcataccttgggccatccattctgtcccctgactggttcttaacacctccttcctgggaaaggtgttttgctgaatttaacattgacctgtgctgctggaaagttccatccagctgtgatccttaaagccctgtttgctctagcttcctttggccaggtctgccagggagactgtgtctgaatgtgcagcatgagcttgtccgggaataggggaatggggttcctcaggccacaccctttcacctctaaacccagtcagctcacagctggagccagtctcccaggggggtcatctagatcaaagctaagtgtggagaataagggctgcttctcctttctgtgggtgcagctaagaaaaagcccattccccaaagagcccgtggcttgtgtcagctagttgaccttgaaaaaatttctttttcacattcattttgctgcattcattttgtttgcactcacaggttgcagataatccagatctaaggtgggtttggtttccttgggtaggttggtttccagtagaagattattttaggagtttttaaaaagagtttatagagtcagatggtacaagtttgtctctataattaagacttttccaccatcacaaactttaaacacaaagtctaaaatcttgggcagcatagaaaataggttctagctaagcaggagttttgtcctctaccaagacctttcctgaaaatcacttatcaagacagtttcctgtaagaaaaagccatatcccagctgattttccttcctggggccaaaatctgctattattcggcctgaaagccttgatgactctgtgtgtgtgtgtgtgtgtgtgtgtgtgtgtgtgtgtgtgtgtgtgtgtgtgtgtgtgtgtatggatgcttgtgtgtgtgtatggggaatatgtgattaatgtgtgttggctgctgttgtctctgatttggctactgttgtttctgatttaaatctaagtaaatgtttaattaaatgtatagaatgctgtctctaatgtgaccctctctccttattaaatcctcttattaacccactcctatgagaccatcttatttcttgcagatgaatgatgctatgggatttgaattgccctgggtgtattttgtcagtctcgtcatctttgggtcatttttcgtactaaatcttgtacttggtgtattgagcgggtaagctacacctctttcatcttgaaagcagagtcctgaggacagttgccaagaccacacaagctttgctggatgagggccgccaagaggggttgccagacattttatgtgtcctctgagatgctttcttttctgctgaggcttcccaaatcaagctgtttcctggaacctcaccaggcttcatgaaggagaactatagaacgattattgaccagaaattaatcagcattgttgcttgagatttaaacaatttccatagcatgccctttttttgtctgttctaaagtgagatacatttataattgctttatttgtctggatccaaatataatgcagattaattgttataaaacgatagcaaaatgagctggattgggtgggcttttggtagtccccatttgtagatttcagccgctgagcttgtccttatttgcagaaaaaaaaaaaaaaagggaaggacctaggcccagtccctgtcctaggagcactaaccttcagcaaagcactgagaggtttggcagctgcaactggggctctgctctttagtaaatggataactgataactgatctccttacattttacaggtaaatgatgcgataggatgggaatggccatgggtgtattttgttagtctgatcatccttggctcatttttcgtccttaacctggttcttggtgtccttagtgggtaagcagtcggatccgtgttgcaccttctcctgctgccacgtgtgaggcaactctgcgtgtctcctagctgctccctgacagcttctctgcatgtgtttggactctgatgtcctctcagtgtgttgcttttggattgaactgtgattctttctgcctgtatctgtctgtgagattccgtgtttccaatgcttgccaaacactgttaatttaatgaaaacgttcccccaaagccagttgtgttagtatgtgaacgtgtagaggtggattacaagtgagttaaaggaattccagccttggtctcccccaggaaagaggcttttgtcccttgtcattttgtgtctattagtacataactccttgtcgttttgtgtctattagtacataacctggcccctttaggtcaccacagtgcattataaatacttccaggggagttttagattttactgtgaaggagaaataagcctcaagcacataaatactggacagtttcaaaatcttccttagattgggattctttattagcttggtgttctagtgctgtcattgtgagaactgtccctgtgattcagttttaaccgaaacttacagaatccttctcttaatgcagagtgatgatcgacttttgtgcacacatttcccatggccttacagagaccccgtcattcagtcacgatttttgaagtttgcttgtttatcacttcctctctatggattgactctccataaagagggtgcaacagattctggcctggaaagggaactccttatgttgcaggctctgccttgcccgtagctggagatgccatcccagaacccttgtgggcagccctgcatccacaccgcctctcagacacccccagaaggtggggtgctacagagaagggagctgggggctgtatggctctctcacaatcagctccttcatacagccattgccgggttgtggggggcaggcaggataccaggaggccaagaggggcccacgtctcccagaggagcctctgtcactgcgctgcgcccaggcaccctcaggaagtagtgttgatggatttgattccaggcaagtttatctcctcctcactcactttatcttgctctttccgaggctgtatctcggggaagtgatgtcttcatgtatgctgagttagtgaaaggctttaatcgcatttttggaaacactgccttttccagagcagaaagcagagtgcgtttatccatctcggcttcctttctgcatcttcccctaaacctgccctggattgaatgtagtcagttccacaccagggacgcatactgtcacaggaagtccctatgtagagttggcccaggggccagtgcccgccagagagaggagtgggggctgagcctgggatggggccacataaccctcccctgcctgagccgcctcctgtagatgagtggctcctcaagcctccggcccttccacctcaacgtgagaagtgtctctctcctagtaaacctcagtggccttaggctagggttggacatgtgagggtggtgtctattcctggagaaataacatcgcatttgattttgccacaggagctttctatacaaggttaacagcaatcctgttgtgaattccttggcgcctcatgtctcctaaacccagctaaactgacggaggccatggaaaccactaattttaacagtgccggtgacatcccttatcttttagctttcccaggcaggaaccgttgccccagcagacatgatgaagtagaggcaggagccagatcgtgaggtgcttaaaaaaagaaaagagaaaaagatgggcgggggggcttcccactatcacaaatggggattaaacctgcaactccgtgggaggtacccaaagctggaggataaaaaaggtacactccttcatggaacaaccagtttactgaaatatattttggggggaaataatttttttaaaaaatattttttcatcaaaacaaaacttagatccctgatggaggagactggaaatgacacatgaaattataaaagaaaacccgagacttctctgcgatttttaactgtcagtgcgggctgtgctcaaacccctagaggctgcacatgacctcctctctactcccccagaaggcctccggtagggctggtttgggtaaaggcagaaccatgtctgcaaagcacagcctcgcagctttgttcctgatttggccagtatttcctgagatcctgtagagtgcccggctctggtccagaggcgaggggtgccaggatgtctcagacacagacagcggccttgtgcttaggcgttcattatctcatggggtagcccattttgaagcagtgcagaagggcacatattcagtagaggtgcagacccagaggctctgtgagctgcactagagagatgaggaggcatctcccccggcgactgacgatgggctggcatgcctccacctccgcccctccgccccctcgccctcccaaccaccaccttccctctctgcctgctactcccctcttactttcccattgatatttttgttgttgtttaagcaaattattattatttttttaaattttagcctcaagagtcttcataattttttaagggaacactagaggtactgcaaaaccagaaggatataaatgttgagaggaagacaatttgtgttgcatagaccctgagggactgtcagaccaacacaaatgtaatccgctaagcactgaattaaaacgccctcattttagaaaggctggtcgagaccatgtgattgccttctcacgaggaaatgttagatggtgctgtatgtcttcaagtctgtcagccatttggaaatacctgtatctgtttttgctccttggctccgtcatgtgtgtggccatgccatcctattgtattcttgaacagactttaatctgcacattggatttggtgtttatttgtaaagtgttgtaacactgatgctttgggaaaatctttggttttataacagtcttttttccctcaaggtaagtatgaagtttatgaactgtaaaccctatgcagccatgcatgaatatagatgaatacttccatctctgatcacagtgctctgtgggaggggctgagaatgtctatgtctaatgttgcaatttaaccttaagttgtcattgaggatatgctcccattatgaccaggaattggaaagaatgtcttctttaagtctgcaattcagacatattacacgtggtcttctagaagtttggcaatttttcacttttcaaattgttaattgaactcccttttgaggttttcatctttagaatcatgctagattcccagggggaccatgggggtcatgggtggtaggctggttggctctgcctccttctccatttcagggcccacctgccaccagccatccctatggtggcagtgtctgagcttgcaagatgggggacgccctaggctcccaggatgtggctccaacccccaggaagggggctggaagacttgggttccgtcctgctggagtcccgcgttcactctgggacttcactgagttaccctgagcctcggtctctttgtccttcaggatatcagcgacatcctgtcttgccgtctcccacacagggtggttttcaatcagctaatgactgtagaagtgcttctaaaaatacataaagggtttttctaatttaacatatccttatcttaaatccgtggatatcccccactcccctcactgggttaggtgggaagggtgcagggtactctttggaaattctggagtgtagcattttctggatttcccagcaggtggccacactttacacacacatcaacgttgtactcaatgtcacccaagaggtggctctggagaatgtggaagcactgtgtcagctgcaaagtattacgcaggtctaagtcattgttattatatatttgacaatgtttttttgcacaaattgaggggaacggcatttctattacatagtggttaagcacaccagctttagaatcagacaaccaagtcttgaatgtttgttctaccttttccagttgtgagatttggggcaagttacttacctctttgagccttactttcctcatctgtgaaatggagctcatcacagtagcagcttcgtgaagttcagtgaggactcagtgagctgaagaatgtagagggcttggcctattgaaattatgacagttcaggaagggtgcatctcttcctggatttgatgcaagaaaagaatcgaatcaattcagtcctttcaaactaattaataatagctggccaagataggtctgtgttagtgaaaagcccaagttatatttttaaaatgttttattatatatataatgacataagctactgctgactaaaggatattactacataaaccccctcctgggcttgctttaaagaatagatcaaaatcatttataattcgcttatgaattcaaacctttggttttggcaacaacttatgaaaaatatttgaaatactttgttaagtagatcttgtatgttgttagacaataaatattgttattaaacccactcttatgacataaaattgaatgtaaacccagcccaggtctataaattcaaaatcataccaattaatttgtattcttggtgttctagtaagttccagatcctaccagatcacaggtatcattttaaatcaatccaattttgtattactataggcctatttatctttagaagtttaagggaacatggatgaagcgaagcattatagaaaactgaaggcaattttcaaactagtttatgtttttgaatctcgcctcctacatcccattctggctaattggataccaggggcctagacaaagactcaggcatggctacttttaggaagctttggtttcctaaggcaaagattcatgggatggagaatgtgaagagggaaggtggtgctggtgccggtgtactgtggactgactataccagaattttacatagtggaatcaggtttggtccatttaaattcatactagtaatagccagacaatctctgatttcttctacttgaatggtggctcaagaggcaaaacacaccaatagatagtagttgtattacttgtgaatattttctaagtggagacatatcctctgggaataggcattcttatacatttttcatgactgagattagatttttctctcatttggccaggcacagtggctcacgcctataatcccagcactttcggaggccgaggcagctggaccacccgagatcaggagtttgagaccagcctgactaaggcagtgaaaccctgtctctactaaaaatacaaaaattagccaggcatggtggcgcatgcctgtaatcccagctacttgggaggctgaggcaggagaatcacttgaaccagggaggtggagattgcagtgagccaagactgcaccattgcattccagcctgggtgacaagagcaaaactccatctcaaaaaaaaaaaaaaaaaaaaaaaaaaaaaaaaaaaaagacttttctctcattcaacactttaccagcatctactgacagaaaatggacaattgaatttcctccaatatatatacctctgatatgtctgctttgtaaaagagtagtgtaattgcttacaacattgaaaaggttgttattggggtcctggggtagccaggatatcggcatgatttgtcaccatattcagaataaaactgtactgcaatagtgagttaattccatatcttggccaacagagaatttttggccagtggctactaaggcacacggaagtccagtctaaaagggacaggggaggactctttgtagatagttcttatgattaaaaaataacttcctatgtgttgtagtgatgattaagctgacagaatgctaaagacacccttaatgattacttgtagcaaagtacttccccacatttagctggatttgtctttggtttgaagaggctaatacgtgaaagatttgttcacagttggatgtccccttttctgaaccatgaagtaatattgtgaatggagttgaatgctgaggttagggtgccggaaagattcagggtccttcggtaccctcacatggcttggctttggtagaacaagaaactaagctctgatttggctttaaatgagagtgctaaatttcctttttctaataaagaacctagctaaacatttatatatacttttgaacactgaactttcttgttgcagagttaacagctgttgggggtagctgacagctggatcctggtgctgttggtaccatggtacctgaagtgcacaggctggtagccacacctgacattaacaagtgagtggtaacctctctgccgctggcttacagctactgtttccatagaaatggctgtcgggatcagtggaaacgaggtaagtgaaagttttcgctgatccttgtttccatcaagctgacgtctgtttccctggcaacagcagtggacagcagccaggcgctagcaacagattcagtagagctctcacttgtcagctgtggctatcatctgttcctgaccaagttctttttttttttttaataatgtacagaaagacctctgaggacccaggaggcacctctggccacatgtgccctcctggatgctcgttttgcagatggagagctgtgtgctgagttgacttctctgtccgcagttccccctccacctgtgctctgggttgttgatgtgcaggttagaagagggaggttgttgagggtattagtgttgcaggggaggctgttgaatctgttgatcccaaatcctaggggaagagaattcattacagtgctttcatgcacagacccagctctttataaagctgttgctaccttaatagttgaaattaaagccataattttcctgtggtccctattcaattggaggcattaacaattgccattacttttacaatgaaaaggatatttaggagtttaataatttggcttgtgagaaacaaattgatgattgtctctaagatgctactgtcaacattatgctttttttctcttttgtgtaatattcttttacaggatggtaaaattgcttttacagagatcaaatattggtattgcagggcagcttggtatacaaagaccagtagatctatagtgtagggaactcttccttgttaaagttcaacagctccttttctggatttcattttaatgtttcaacagatggatgcacccaagccctagccctaagtattctccacccatatgagacagcattgatggtgccacagagcaaaggagagccactgttcctgccctggtgtgtgagatgagaggcatggaatgaggtgttggttttaagcccttactgataccatttattaaagagattttctctggaaaaaacaaaacagctttgatattcagagctgtatttttgagactcaaatgaacataaagatccacggtcttatgagaacttagatcggctgctagaagagcattggagaaccatggagttttgtctttggagggctttccggatgacattgttccacagctctctggaaatagggcaactgtgcttggcctgcaggcagttgaatttgatataacagacgaataagaagcagaaaatcctgctggatccttttttctccctctctcttaacttcctaagaatgacttattcatttaatgaattttttttcagttcctacacagtggtagatgtatgccaagtgccctgctaggcactggggttacagtggtggaatgtaggcactgggtaggcaccaggattacagtggtgggatgtaggcaccagggttacggtggtgggatgtaggcaccgtgtaggcactgcagtgacagtgtggaatgaaatggtttctttcttcgtgaagcttatatctaatgatggaggccaaaatgacaattacaaactcgtataaatgctttgaaagaaaggttcatgtgctgtgagagggtttaacaggcacaactgctgtcagtttattgggtaggagcatcctggaagtgaagaatgagtagtccacatatccaggcaaggtgggacaagaagctagggcaagggtattctagtcaagggaaaacccacagaaaggaggtacagtaggaaggagcagaggatgctggaggaactgaatgaagctagggtgacaggaactgggagagctggagatgaagtcagatgaaaggaaagagactggccggcagaatccaggtcacgtaggacctttagactatgtcacaggttttggtcattagctgaagggtaagagaatgcatggatgaattttaagcagggagtgatattcaaatttacattttctaaaaattatgctgtattctcatatcctcaacttaccttaaaatgcttcaaaaagataagatgattaatagatggatagggggatgcagagataggtgataaagaaaatgtagcagctgggtgctgtggcttgcacctgtaatccgagcaattcagaagggtgaggtggaagggttgcttgaggccgggagtttgaaaccagcctgggcgacatagcgaggctttgtctctggtaaaaaaaaaaaaaaaaaaaaaaaaaaaaaaacagaagtctttttagctgggcaatgtggtgtgtgcctatagtcccagctactcaggaggctgagacaggaggatcgcttgagcctaggagtttgaggttgcagtgagctatgatcatgcttctgcactccagcctggggagcagagtgagaccctgtcttaaaaaaaaaaaagaagaagaagaaaaggtagcaggtgttaattatggaatctaggtgaggtaggcatatgggtgttcattgtataattgtttctacttttatggatgtttgaaattcttcctaataaaatgttgggaaaatctgcatatgaaaatcactgtggctgcagtaatatgaatagattggatggatacacaaatggatgtagagagaccaacttaaggctcatataatctgcttccagccacaacatactagtgctaccagactggacctttcaccataaacaactacaaaagactgggcaaaaaataggaagcaactattttcagaaaatggaaataggatatacaggattgcaatccctacgagaagggaaacacatgaggtaaactccgcagttgtcctggctttctgcctggagacagttttagaattatggcagagagggagagcccagcagagaacgatggtctatttgctgaggggtcaaagaacagtgttcagggctgctaagatagctgggattttcagggcagagtatgggtgagaagtatgcagagaaggggctccagtactcagagtggaggttctttgaaatctgaccatatactaagctgcttctgtgccaggtgatacttattgaagccaggcagagaacagctagtagaatgctgtaagtggttggaaatctctccgtgctgggaggtatatggttctgctcagctgtagtggaaggacctaattgaatacattgggtactgagacttcagaaacgccaggctttagggttggagctactttagcccttgagtaagcctactgtagacctgacttaaaaagcatagaaacaagcttcaaaaggatcagggaaatggccaataaattaaacacctgtcaaaaagacaaaaatcaacactcgttaaaggaagagaccaaaactcagatgttcccagaatgtttttcctcatgacccaaaactataagacatgaaaagaagcaggaaaatattcacgatcaaggagggaaaagtcgatagaaacaaaagatgacagatgttgcaattaataatcaaagactttgaagtcactactatgagcctgtttaaggaactgaaggaaaagatggacataataaaagaataggtaaatctcagtaggtaaatagaaacagtacaatatctgaaaaaagtagactggacattgcagaaaaagttgatgagggcttagtgatctctaaaacaacaataagcaatctggtgtatatgaaattggagtcacaggagaataaagagattgaggaagaaaaattttaagataaataaagctgaacatgttgcaagtattgaaaactaagttaacagatccaaaaggcccaacaaacctcaagcaggggaaacacaaagggaaccactgctaagcacatcaaatttagatggctgaaagtaaaagatccagagaattttaacagaaagcaaatgggaaagggcacattacatactaggagaaaataataagaatatgcatttacttgtttgcagatatagtgcaagttgtagggcaatgggtgacatcttcaaagaggtaaaaggaaaaacgattctgtatgaagcaagaatacccttcacaaaagaaggaagtagaaaaactttcaggtaaacaaaatctaagaattggtcaccaacaaatttgcactctaagaaatgttaaaggaggttcttcaggctagaagaaaataataccagatagaaacgttaaatgtccgctttaaaaacgaggagcatggccgggcacggtggcttacacctctaatcccagcactttgggaggctgaggcaggcagatcacctgaggtggggagtttgagactagcctgaccaacatggagaaaccccgtctctactaaaaatacaaaaaattagctgagagtggtggcgcatgcctgtggtcccagctactctggaggctgaggcaggagaatcgcttgaacctgggaggtggaggtcgtggtgagctgaggtcacgccactgcactccagcctgggcaacaagagtgaaactctgtcaaaaaaaaaaaaaaaaaaaaaaagcatcaaaatggcaaacaaagataaaagattttttctcatttctaaattttctaaaagataatttaaagtaagcacaaggtattatgggaactgtaacaggtcaaagtaaattataggataaccatacacagaagatagaaggaagttaaatggagcttcactgtgataaagttactacattttgaaataatatgaattcatggtagactgagaacttaaggatgcatatgataatctccagagtaatgacttaaaaggggtactaaaaagctaaaagaagagataaaatggaatattaaatagtactaaattatccaaaataagtcagaaaaggaagaaaaaggaacaaagaacatatagtaccaacaacgagatggtagacaaacccagtaatatcaataattgcattggacgaaaatgtacacaacattttagttaaaagatagaaattgtcagactaaataaaaatttaagatgctataaagacatggattaaaaataaaaaatggatgaactgtactaatccacacaagttggactttagtataaggaacatttccagaaatagggacatttcagaaatagacattttattctcataaaaaggtcaattcactgagaagacacaatgatcctaaatgtgttggcacctaaatacagcttgagagtacatgaagcaaaagttgttaaaattaagtggagaaattgataaatctagaaacatagatgaaaatttgtatcattccttctcaataattactaggttaaaaacagcaaatatagataatatctagattatatttagattggttaataaattcagccaacttgacctaattgatatttataaaatactgtgttcaataattgcggaatacacattcttttcagagcacgtggaacattcaccgacatagaccatatcttggccatgaaagtctcattacctctcgattgaaattttacaaagtatctttgttctaatggcagtagatttaaaacagaagccaataacaggctgtttataaaccttcccaaatgtttggaaattaaataacctataactcaaaaaataataaaaattagaaaatactttgaaactgataaaatccaactgggaaattgtatgatccgttgaatgcagtgcttggagggacatttatagctatatcagtaaggaagaaaggtttaaactcagtagttctacatttccatctactaatctagaaaaagaagaccaaataagtccaaggtaagtagaaaaaagaataacagaagtaaataaaatagaaaacacaaattataaagttatttagaaagcgtaataaaaattgataaatctctaacaaaactaatcaaaaaaggaaaaagagcaaattaccagttttataaatgaaagaggagataccacagatattacagacattaaaataataagagaataaacttggtaacttaggagaaacaggcaaattccttgaaatacacagcctaccaagaaataaattgggagagtcctatatttgcctttttaaatggaattcagaatcgcaaacagaatcgcaaacagaatcttctctcaatcttctctcaaagaaaattagaagcctagatgaggtcaaaagtgaattatgtcagccgatttagaaaaaaattataccatccctagaaattctttcaggtagtaaagttggagggagcatttcccaactcatgaggccaaaatctcaataccaaaactttacaaagacataataagcacagtgtccttcattaatttggacacaaaaattctcaaatattagcaaatagaatatagcaggatgaaaggaataatatctcatggccaagtgggatttatgccagaaataagttgattcaccattggaaaatcaaataatttaccatattaatagaatgaaagaggaaatcatacgatcacctcagtaaatgcagacattactaacaatattctataatgatttctaataactctcagcaaactaagaatatgcaaaaacttcctcagcctgaaaaaaaaactatagctgacaacatacttattggtgaaagactcaatcttttcttcttaagattaggaacaaagtaaccatttttctatcttcttttattcaatgttttattgaaagtctgaaggtaagacaaagagataaaaggcagaaagattggaaagaaagaaaaaactatttctatttacagacataattgtctacatagaaagtcccaataattgaaccaaaaacctgctagaattaataaatgagtatagcagggtgacaggatacaaagtcagtatacaaaattccattttattcctgtatacaagctgcaggtgttgaaaatgaaattttaaaaaattaccatcaaaaattatttacaatagcattcctaataggaatgaatataagaaaagatatggaagacctctacactgaaaactacaaaacactgattagtaaaattacaatgatctaaataaatgaagatataccatgcccatggattgaaagactcaatattgttaagatgtccatttttctctatgcattgaatgttgtcccatttataaatctcaatagcctttcttttagaaactgacaagcttattctaaaactaatatataattgcaaatgacctctaatgaaaacaatcataaaaaataaagaaggagggcttatactgctgatttcaaaatttactgtaaagctgtaataaatacaatgtttgacataaagatagatgactagaataactgaatggaataacaaattcagaaattcctttatatgttcaattgctttttgataaaggtgctagataattcagtggagaaaggatactctttttagttaaaaaaaaaaaaataagctggagaaactgggtatctgcaaaaagtgtgatgctcaggtcataccagacacaaacattaaacttgaaatcgatcatagatctaattaaaaagctaaacatataaatattttctaaatagatttctgctcttcaaagactagaaatttaaagggaaaccacactgggagaaaatacaacacttacatctgtgtatctagaatatgtgaagaactcttaacaactagataatagatgagcaactcaaaaattggcaaaacatactttacacaagaatgtatatgagtagccagtaagtacacattaaagatgttctatgtcataaaccatcagggaagtacaagttaagaaactgctacatagatagtacaatagctaaaatcaaaaagactatttccaagtgtcaccaagagtacagagcaactgatatgctcatacattgtttatagaaacataaaatgatacaactactttagcaaagtttgtcagtatctcataaagttaaacatatactcaccatatggccaagcaattccatttctagtatttgcccaagagaaatgaaaatctatgtctacaaaatgactagtacatgagcactcatagagccttattcatagtagcccctgtggggctgttggaagcttcagtctccacagactcggccttgggtggaggtccgcccagctggggtgaggcagtgatctggctgcgagctgtgccaccctggcctgtggggtctctgctggctgagggattactggtttctctgttgtagtgaggggagcacaaaggcaggggtcagaagtgctggcccgtgtgcttgctctgtacttacagaggcatgacttctttggtcagtatacttcacgtttccaaatcaaggctttttcttcctaaaattggagcgccccatctctgacttttctcacagagccatcctaataaccaaggagagaaatggatgggaagggcctggataaacgggaagacctttccaagtatgtgggagctccacactggcctggttgtgtcctcctcctcggaggtcatttctgtgagctggaaaagtcatctcatttgcagtctggatgtttatctgcacttctctccagggcctcacatccttccaagacctggagcggcacttggcgcattagcctgatttctctaagtctgactgtcatgagtttggttttgggttcagggataaaacattaatccacagtgaacccatcattccttcgaatttctgctttaaaataaatcttggtttaagttgcctgctggcagttttgggcctctgagtcttggagacccttgctgtgtctgaaggattttaagtcagtgggtgagagtacaccacctgctgagaggtgtactgtccccagaggcccacctgtccttaaatcatggactattacttacaaacaggcccacagacacatgccaagaattccagggcccagtgtagattccagcagctgcactctgtccccctttggctatcagtcaaggatgtttcagcgtcaaacctgtacctatcagtatgccctaggagcacagcagagggttggcaagtcagagggcctcacccaaggaagctgggctccagttgggcattgaaggatggacaggattcgttaggatggtaaagaaaggaagcaagttgtcaggagagtgggacctggtgcctcctgcctgtcggaaccagtgagtgcaatggtgaggctgccagggtgctccgtgctggctggtgagcagtgggcagagcagatgtgcagttgggaatacccactgagagaggcagggtttttttttttttctttaagctgcgggagctgtcagagtgtttgaaataaggtgatggttgacagctgtgcctggaaggtaaagctgccacctcccagagtgcagtggagttaggagagcctgggggctgggggctgggggctgcagggatggggtctgcatggaggtgcagaggtggagatggaagtgaaggtatagatgtgggagtttgttgtggctcgtgcctctcagataagaagaggtctctggattttgattgtcaagtctggggatgtggattgtatgagagaatttttcttttttcttttctttttaaaaatattttttatagagacaggtcttgctctgtcacccaggcagcagtgcaatggtgcgattgtagctcattgcagcctcaaatttctgggctcaagcaatcctcccacttcaccctcccaagtagctgggactacaggcatatgccaccatgcccagctaattttaaaactattttttgtagaaacaggatctctctatgttgcctggctggtctcaggttctggcctcaagctatcctcctgccttggcttctcaaagccctggaattacaggtatgagccactgcacccggctagatttttttttaattgcttataatcctgtgctttattcagtttattttaatcatctccactactttgatgaggtaagtgttctttgcctcagtttacagatgaggaaatcaagactcagggaggtttatcaattttctcaaaatttacacagctagtaagtagttaaactaggaattaaatctagatctgtctgtctccagagcccaagctgcttttctcgtcagttggaagctggttctaagtctggtgagaggaaacccgctgtgggaccctgtcttcccagcctgggtctgtgctcgtacatcctcagctgctgtattctcaaagctctatgctttgtcgtttttgtttttgttttctcttcctgaaattaattacccaatgctgagtggaacaatgggatacagaggcttcagagaaattggtttagttttcctcttgaatctgcttttggacaagtctcatttgagctcaggtggtccttttgggtcctgttgctggagggtggatctctcagtctctgagcccagccctggggtgtggtgctctgccccttgttctccgtcagccaagtctgggtgctctgggaaggtacttcccacccaccgtgcctttcagtgggcactccccctgcggggggatcttctctatccctctcctctctagatgcagctcacagggtggtttccgtggcctgcgagtgggatttgggctgaatttcctacagtgactgctttagggatatgccagtagggggttcaatttcagccccttccttgggtccacagtgctcctccacagtgggaacccctagcagctctgaacagcagatccagcctcgagcttattctggcagtgtaaccaggcccttcacacagcaaactgtagtgacatgtcagtagcacatgccctgcggttgctggtgccttcaaaagtgttcattttaggtggttctgccaccctcccaagccagacttcatgtgcacatcttccttattttttcttgaaaaactggaatctgacaagtctagcagagtgtgtttatgaagtgacttcttaagtagcagtatttgaaacctgtcatgaagatatgtgatgatattggtttggctcatgtgattaagtgatctgtttcgttcagagagagtgatggcagaaaagagagcccatggttttgaagaatacctctttttttttttttgggggggagatggagtcttgctcttggagtacaatggcgcgatctcagctcactgcaacttccgcctcctgggttcaagagattctcctgcctcagcctcccaagtagttgggattacaggtgcacaccactacgcctggctaatttttgtatttttagtagaaatggggtttccctatgttggccaggctggtgttgagctcctgacctcaggtgatctgcccgtctcggcctcccaattgaagaatacctcttaaaacatgtttaagttttaaaaagattgaaacaaagtctgtaacttttagcatgcaaccttcatggattctcatcattgggaaaaattttctactggaagcattggcatgtcttttgtagccatggaaactaacccttcaaagagagagaagctcttctatcctcaaacaaggagatacagtgaaaggaaggcatatttcatactcagatgcctgaaatactttatttctgtgtgagtgtgtgtgtgtgtatatatgtaatatatatattgcagatatatattacatatataatatatatattacatatataatatatatattacatatataatatatattacatataatatatatattatatctataatatatatattacatatataatatatattatatattatatctataatatatattacatatataatatataatatatattatatatattacatataatatatattatatatattacatatattatatataatatatattatatatattatatatatattttaaggcttatacaagactcctgcttgtttttgtttatcaatggcacgatgggtgtagttttaggtgattgaagttacatatgcactgtggccaaatacacccagtacaaagcccaaagttgcatgtctttgatcctcattagtgtaaagtccatgtttgtgaaagcaattatttaggtgatttttatcgagcaactactaatggccggggtttgtgataaggaaccagtatacaaagataagacagacacagcccctccttaacagagtttacagtctggtaagttaaagaaaatagtgaaaaaccaattgcaggactgtgaagtaaattctgcaaaagcggagttctaatctggaggactctaaggtagagaaaagtctttatgtcttgagccagccgagtgggatagtatctggaagagcaggaggggttatgcaggcaacagcatgcacagtggcctggtgttgaaagagctccatgccttggaggaactgagtgaactttaggatgtctagagtacacagttcaagggggaagaggtcagaaaggaggcaggagagatctgacatgaccagataggtggtgcattccttcactccatccctaccgcactctcctgctcagggtaagtgccacatgtaaacagttaggtttggtctgtgcagggtggcccagctgctaattcctgtgttctgttcatggtggataactcaacctagtcattaaaagctaggaaacaccgactctgaaaatgattcatcttcccaaaagatgaaaactgttttaaacatcatcaccgtcttttatgtcaatgaaagcatcaacaaccctggctgggcacagtggctcacgcctgttttcccagcactatgggaggctgaggcgggtggatcccttgaggccagaagtttgagactgccctggccagcatagagaaaccctgtctactaaaaatattaaaaaattagctggacatggtggcgcacacctgtaattccagctgcttgggaggctgaggcacaagaattgcttgaacccaggaggtggagggcatgccactgcactccagcctgggcagccgagcccagaccctgtctcaaaactaaaagtaaaaatagaaatgtgattgtcaaatgtttttcttcaacatattttactgtgtaaacaagggacccccattttctcgtcctttttgcccaccagcggttcccatgcatttcttggcagctgtgtttcatgactgctgctggagaatgctgtcccaggccagctgtcttccccccacagacattacctgcaaaggagcaggtcttatttatggggtgctgtattcctaatccctccccaccccactctgcctattggtctcatgcagagagaacatcctttggctatcaccagcttttcatggttgagggaaaaatggaacaaatacaatgcttttgatgaactatgagctgagccagtgccaatgattaaaaattttttaaattgtgaaacatcacacattgctgttattttttttttttttttttacaaaattcctagtttccttgaacagaaactgaacctttatgctttccaagaagttatatttaaacaaaaaagttctttgaatcaaactacatttgcattctgtttcatttccttcatgtctatgtagaggaaataatttaggtctaaagaaggctggactcccctgataaaaatcagtgggttacttcttcaacttcccccttctctttgcctttataagtgttgcctttgtttttttctgaatttctgagccttctgttttactaaaaatctgagtccctagtgattttcgtggcagttttcaatggaggttatgttgttttttgctttgtttcgagggttttttgttttgttttgttttttgcatgtgtatgtaaatatcaaagtgttttgtttgtttaaattttatgtgggtctaattaaaacagatagcattgcaacacaagaaaaaaaaatcctgtatctaaatcaagatgacttccagtggcccatttattttatgggacgtttaagaaataaaagttcccacagcaaactgcgtgtcctcttgcatctgcggcagtcccattccacctgcacctctgtttgtgtgtgatggctggctgcagcctgggcgtgctgtctccagtagtgttggctgagccaggggtccaggagatcaggatgtcagggcctgtaaatcctggggcatgtgagtgtctggtggcctctctgcagaacatgaggcgtgtgcccagcccgtgggggctccactggggctccttagatggaggctggctgggtctggggcaaggggttctctccctggagtggtgcttactgagtgggagtgagggacagcaggtggagagatgagcggaaagggggctgtcacctttctctgtcctgagttggggctcttggggaaaatcagagtgcagtagtgagcagagctgggctttatgccctgtcctccctccctggtcctgattcatgacctccccgtgagccacagccccacggaagggacgtaggatttggagcctggttagtaacgctgttgttctgttgactgggcatatgatgtgggccagcaacaatgcctcgttgagcctccgtgttggcctttgtgaaatggatgtgaaaatcctcctcctgcctcttccactgaggttgtgagcagcccagggggcagtgaatgtaaagacatttggaggactctaggaacaatctaaataaatgaggggcttttttctgttattgttagagaaggggacatggcagagactcaggctgttttgccaaaacccaggtcgctttccccagctgtgcaggctcgtattctgctgaagctgctgttggttattcctgggaccctgggcgatgcagtcacaggtgaaggaccctgggcgatgcagtcacagtggggtgggctcaggctgtgcttgtttcagagacgattttggcttgttctgctgtgtttgtctattccatctaaaggtcttttgggggctggatgagtatggggcgcataccattgttctgtcgtcagagcgccctgcagccatttctcgtgaactcactcagcacttatgcttcttgggtgtcaatgccaccaaactacttggctgccaggtccaagagcgtgccaggctgttgcccagggaaagaaatgggcaacaaaaaatggactaagtcacagcagtcaggtccccgtggaggaggtgctggggaggctggagtcgcagcagcagctgaaaggtctttagaacgtgctgtgatctggtgtcgctgccgagtcattagtccatctctactgaggatccctgtctggggaagttgctgcatcccagggcaactgtgctgaaatcagttgtcttatttcaaaacttgtgcctgtgccccgagaccctcagcaggcatccttcttccttcatatggcagcccttcagatactggggaccagcctctcttctccatccctcctcctgccccgcccagcccgtccttcttccctgaacaggtggacaagaaatgttcatgtggcagatggggtgtcacggggccctgacaaggaaggtccacatgaggggagatgattacactggtgtgctagacccaggggactggtgtggaaagggcagaggtgacagtgaccgtagcatggtggtggttgggggtcagtgacaggcgtcataggtgtttttccaaatagtcgtgtaagaaagttggggcttcatgagaagtgtgtttttgaccacattggtattgatgttaaatccaacccatcacccagtgcttactgaatgtctctggtcttcctcagcaccattttcttcttattttcattttctgttcacgcataacacctgtgaaagctgataggagtcctatcaaatttctgtctgttcctccttgcctacagagaagcaatccaggttccttagttttgtatttaagcccctttctggactgacaggaagcctgttttcgttagtttttttgtttgtttgattgtttttgagacaaggtctctgtctgtcacccaggctgcagtgcagtggtacagtcacagctcactgcaacctcaacctcccaggctcgggtgatcctcctgcctcagcctcctgagtagctgagaccacaggtgcatgccattgcacttggctaacttaaaaaaaattattttgtagagatggggtctcactctgttgcccatgctggtctcgaactcctggcctcaagcaatcctcccaccatcacctcccaaaatgttggtatttcaggcgtgagcctctgtgtctggccttgtagcctggttttgatcctcatcctcctggtgtctaccttctccttcctctgctcctgcttttccttccaggcatcgtgttgaggtgcttagggtagattcagcagctgcatggccttgtgtgcccacgtgctgtgagcctcagtgtctatacaagagggtgatagcagcccctgcctccccatagtcactcaccagcggggatggggtaaggtgttgctctgggctctggttaggttgcaaggctgagggggccacccagggtaggggacacatgtattcatgttttggtgctcaatgagtagagttttctggtgaattagaggcaggcagaatgcatttggatggggtaagccagagaatgtgtcaccaaaagcatgagacttgagcttggtcttgaaaggtgcactggattcaaagatgggagaaggctgcccaggtggatggaattctgtagacaaaagctcacagggttgcggaattgagaagagtgtggccagagtataaggtgtgcatttataggatgggtgaataaggctggaatagcacttgggagaaggctggaaggccttgagtggcaggcagaagcatctgaccttcatccttgagggaggcaacaaggagctgtgagacattctgagtaggatgccaccagggggaagtctgggtctgcagcgacctggagcagagagggaagcaagctctgatgaaatgctctggccgcagctcctgtggctgcccagggaatgggtgtgtgcagacaggcctgcataagacacttcacagctgtcctgttaggctgttagggagattccttactgagtaattgcttctcaaccaggagataaaagggaatatcttaatgacctagagacagaagatctaccacatgaggcctgaacacaataagggaaaatggcgagctggccgtggaggctgctccagatgatatgtctagttttgggcacactcatttcatgcttctgggcgatcccagcaattgtgggctttctgtcctatagggacattttctggcctcctgaaggagtaggagtagggcttgttttgttggatacaattttttgtacatagccttcctgcatgcctatatgaagtggcgccaaggggaaatagagacatgggaagaaatacatgagaaatggacagacaacattgtccgttcctgcctgcaaggagcttacagtctagctggtaagctgaaatgaatatgtaatagcatgaatttgaatttggttagtagtggagttatatcttctaagcattcaaatttttttctatttggaaataatttcaaatatatagaacaaccccaagaatagaaatagcacagtgaataatccatgtaccccttaccccagttcacctaatattaaattttacctcatttactttttcatttgttatctatccataagacatgtggactgatttttaaaaatattttataatttattactgtccttagttatttcagtgctcaaatttcctaagatttggctagtaggagctacttctctagctcctgtatccttatgacatatctccataatgtgttttggtttgtttttgttttttgagcacttccttattttcttcatcttgtacctaccctacccttgccctggaatcacccagttctccaaagtcccctggttccttttaatggggaatgttattagagaccaagatgtgggtaccaggtgtgcttgtacctgccagagcatctttgcttctaagtcctttcaacaggcagacctaggaaatatatgcatttccgtacacatattcatacacatacttacattgatacatacacatactcacatatcagcctcttttaaaaatcagacattggaaatcagactttaaaataaacatcttttagaaatcatcagttcacacctataccttcaattccagcctgtccccagagggttcttctctgttccgtgtttctgtgtccctccttccacagcgagaactctggctcccagcagcattagcacatgtactcactggctaaatcctgtaatatgtctaagatagtttcagaatggtctcatccacatcactgcaaaaaacaaagctactgaaaagagttcagcatttgtttgtagttcatccctcactccaatcctacccaagactgagagtatgtcgtcaaatattcatgagctatttgaattagttttgtctttctccttcagtctggttatggtattcatttgaattacagatttgtttgtttcaaatcactttcagtttaggggtattttcccttcatctcatccttactgacttaatttttaaaaatttaaggtgaagaacattaacatggttcccaaagtcaaaactatagaaaaaggtatacttaagagtgtcactccaaccttgattcctttggcctaattcattcccatcccttgttttctgctctttcttttagatacacctgagagaaatatgctccttttatttcccagtttttcgtgtgtaaagggtagcacactttattgctttttttttttttttcatccaggcacttcttatttatcttttgatcagacacaccataaccaaaattctggtttggaacaagaagactcctagcatataacagttgttggatttttagtcacttgcaaaagtctgttggtttctaccaatagctttattaaataagctttgtaaaacaatctcttagtaataggattcttagaatatgatgaattcttatgcaaagtggagtaacttttttcccatcattgcaaagtttgatagaaggtgcctcggacttgaggtgtgattttcaggatcagagggtcagttgtgatgggaatgggttattctcaactgagcagatagtgtacaggattggcagtgggtttgccagctcattgcgatcactctgagccttgggacccatgtgtccttctatgtgtctcccaatcctaacgggtttgtggcagcttagagcccattcacagctagtgctaatttttctccctttgataatttgagaaagctcttccatttgccttttgaatgtctctcttatgtctggattcaacaactattatacatttgaacttcacgttgataccactctttgtgttttcaaagccttactgaatgtcttgcttaattcctgtgaaacagcggaacaggtattgttgtgtctgtttggaagtgaggaaactgaagctcagaacacagcagtgacagagctaggactagaagccaggtcttcagacgaagagcccagagtggtgtaggagggccaaggatttatctgggtttatcacagggactctacctccctgcccccttcctccatcctgccctgtggccaacagatttctactgtataaacctcacctctgtccacatcaataaataataccttcctgctaaatattcagccattcagaactgtctaaaatcagttcagagggtctatatcagcagctttgttatatgagcttttgtgatagtgaccatcattgtgagtgggccataaaccaggacttggcagggttttttactcctaggaattttagtcagagtagagttttacttatgcctgcttacctgtgtcccagcagtggaaaatgtacaacagtgatgcagcttgttagaaatgggatttttatatttgtaatgttaaaaaggcataaaatattacaaaagaaaattaggaagatagtaaaagagttaccctgagaagcttaaggacgttcattttataatgtatgtaattatacattataaaatgtatataattatataatttaaaaataaaatataattatataattataatacattataaaatgtatataatgtatgtaattatgcattataaaatgaatgtccttaagcttctcagggtaactcttttactatcttcataatttttttcccaagaacccatatatgatatggacccaaagtaagaataccttgtttgtatgtaaccatctgaatttagtattctaagttcggaatcaaaacatgcaaacagatttgtactaggatacttttctggtgaataatagaactgaaggtccacttttctttgagatgtatttaagaaaacagattatataattcattttcctgcagatacatgacatgccaagccctcttactgttgctcagggatgtgattctggattgagttgtgattttttcagagttcagagaatcatttggtgaatttacctagagctgagttatgtatttcccatgtgtcaggaaaccccggaggcctagaaaccccaaaccattctcagggtgtggtacatgtgaatggcgagacactggagtccttacttctttgagacagcaggtgttctttgggctgggaggtcagagcacgtgtctgggctcagatcggctcctgctcactctctagatccacaaagcctggcctccttccttattcacagggggtggagtggagactgacagccctaacaggaccaaggataggttccagggagtctggaaagtggggtgatttagaagctatgagagggatcctttctttttcttttcttttttttttcctttctttctttcttttttatttttatttttattttttttgagatggagtcttgctccgttgcccaggctggagtgcaatggtgcaatctcagcccgccgcaacctctgtctgagtgggattctttctaattgtgggcagagggtggcacttggtgaggattccagtttcttatctgaagtattagtgtcactgggtgtgcaagcatctgttcagcccctcgacagcctagagttaagagacgggtgtgaatatggggttagttttgttgttgttgttattattattattattattttggagacagcgtcttgctctgttgcccaggctggaatgcagtggcatgaacttggctcactgcaacctctgcctcccaggttcaagcaattctcttgcctcagcctcctgagtaactgggactgcaccaccatgcccagctaattctttttattttagtagagatggggtttcaccatgttgaccaggctggtctcaaactcctgacctcatgatccacccaccttggcttcccaaagtgctgggattacaggcgtgagccaccgtgcctggctggggttagctttatgaaagcaggtcacttccccattcgtgggttgggttgggttgagttgggttgggttggcttatcgaggtaggaccctgaaagagacatgctggctttgactcggaacaaaggcaagaaggcagacagaagtaacctgtgtcagaatctcaaggtctgtgtgcagaaactgcattgctgtaacctcacctgcttccttggcagctttttactaagtctctaactcacatatcttggctcctataacaactcacggttggagatgcagatggttcctcatatataaaaattgggtaatcgtccacctgactctcaggcttgcctgagtatgtggggttttgtatatatgcatagtcagaggcttgcacacatggtggaaagtagcataaacaccccacaattgggaacatttacctgtctgccagatcttttccagggcaggtgttcctataaatgggcagaaaatcatatgcctcttcccctcctgcagggaagacttttggggaagaccatgacaagtagcaggggttaagaaaaacagtaatgcttcatcagtgctcgagttcccatctgggaagggagaactgggttgtggagggggtggggactgccctgactccatgcactgctctggcccgaacctgcaggtgatgggtagaggagcctagtgtgggcaccagcaaggactgctgcctgctcagagctcttggtttggacaaaaggggtagcacacaatattaatgcaaagtttgtccaaaagcattgaagaagttctaaacttggtactctttgaccacagcttggcccatttgggtccctcctctttgaggaggctctggggaaagtggggcgtctctgagttcaggccccttgttggggggtgtcagaggcctgccatgacagcacatggtgttttgggcctaggccccttgagatcgctgtcatcgaggggagttcattttctaagaaatgatgcatgtgtgttggtgtgggctctgcgactctgacccccatagtcttgctttggaagacactgtcttctgtcctgtccaagtgtgtggctccattgctgtgctcatgtgactatactcagtgctgtgtgtcctgcccacaagactgttgtgcagtagggcagtggctcaggatgcaggtccccaaggatgtcctgatatgtgcttgtcctctttgcctccttcagagaattctcaaaggaaagagagaaggcaaaagcacggggagatttccagaagctccgggagaagcagcagctggaggaggatctaaagggctacttggattggatcacccaagctgaggacatcgatccggagaatgaggaagaaggaggagaggaaggcaaacgaaatagtatgtagcgcctttcctgcccctggctagacagacccagtgtgcggttcagacgcctagcagtaggccttcctcgactctgacccaggctgtgagtgggacagcctcctcccagccatctggtcccttctgcctgcacacatcacggagagaacaggtgcattggtgctgactctggatttctgcctgaggtttggggtttagagttgtatttggtaaggtggctttatagccaaggaaggtcaaacggacccactgttggcctgggaaattcagtaagcgcatttctgtgcgggcacaggggtgatgagacacatattcttgtaccacaggagaagaagctgtggtttccctcacctcagagtgaacagtgttattggacaagaatttgaagtgcagggttcctcttgactcttactcttaggccacctgacatggctcctacatgtgctattcatatgaagccatatgcttagcccatcaggggctgggaggaaaccggctcaccattctaggcaggtgttaaggggcacgtgagtcagtgacagctgctttgctgtcacccatcgacaccccacactgtgacactaagcaccctagagcaccttctgcaggaggcaaggcctgagaactcagtccatcactgacattaattgccattgtcaaccacggtgtctctttcactgcatacttttcccacagatgcgctcttattctctctggggccctttgtgcctcgggtcagagtggaaactggaatccagcaatgcatttgactgagatgtctgtgacttgcttcaaatctagaagagttggataggaaggaccaagaacgtacttcaagtgcacatgtccattgagaggcctggggacccgaggccggccctacgttgtagaagatggccgagcaagtccctgcttgagcagagcgccttggatgttttgctctcagcaaggcctgttgctgggtacaggggaaacccagagctggagaggatgtggagtgctgcctcctagggagagacaggcctgtcacactaaatgcagccctggggagcagagctgcagggcacacatagagggcaggcaccgccgacgagggatcgaggacagggctggagggagcatttggcctgggccctgaaggatggatggattgcaggtgtgaccattcagtgtcagaagaagcaccctgacccaggggactagcgtgagggaggcgtggaggtggacaaaggccaggtttcagggaggaagcagtgggcccttcagctggagcacagagggtatgaaggtcggggtgagctgccataggaagggtgggtgaggtgcaattgtgcctcttctggaggttgtggagtgtgtaagtgggggctgagagacccctggtggagaggcttcttgactgagagggcccttacctttcttcaagcctgggctctgtgcctccatggggagggagtgtgttccgtgatctcagatgccctggctggtgcaaaccagtgtgctgactgggagtgggcagggtcaggcctctcttctctccctccctgcttcttgccaggctcaggaaggggccaggactttagcacctgaggatcagaagactgagggagggtttctagagctaactgtttgctgaatgcaagttcagagtttataaatagacattcatgtgagtctcagactcagcgatgtgcctatgaagtgatcagatgtaagagtgtctgcctgtcctctgcacagctctccccttggcagttgagccaacgtgaaccccatggctttcgtggagcttctgcacctgcagtatggcaacaggccatgtaggtgcagcttggagatgcctgcaccgctcttttccccttcacttgcaaactgtaactcagatgctgacctgccccatctcccctaaacccaacatgttatttgtaaacgagaggaggtatggcccctttttctcagcagagtgtctttctttgctagtttagctgtgtcccccagggagctgagtgaggccttcttacaggccagtggcctttcctctgtttatttctcctcctctagaagtagacaaggtttcgtgttctagtgttgctaacattagtcgtggtagagttgtttatagggcctatgatttgaggattaagggttttcattggatttaaggtgatatcttgagggttaaccattttatctcagcccagcatttcctatgacctatcactgtaaaaacctgatgatgacagaaatcaatgactctgcctttcagagaacttgccatgaggggaagatggagaaggagtggcttagtgtgagaagctgatcccattgttaaggcccagcactctgctgtgtgagcccaggagggcgcgatgattctggctggtgggagtgggcaggctggggcgatgtgaggaaggctccgtgggaggagcagccctgggcggcagaggttgggggtgggggctttttcaagctggggaaatggcacaaacaaggtgtgcgaagtgacaaatattcagggcccttaagtgcattgctcagtaatataatctaggaaagaaacaaaacctgtttaaaagccttgtagatcttcagaattcactctcactggggctcccaagcccataaagctgcaatgtgtcttgggaacatcagcagtattgtttctgctatgcaccgtgatgtgtgactcaaaatgattaactagcttaacgtttgatccagaatagcaaatatttctgtggtgcgcccttgttctttatggagctcgttttgccaggtgctggggtttcctgtggagtgaggctcacagtgcttcccgagtcatcagatttccagagccttgctgatgagggttttaaataaagacagaaatcttggctgtggaggccatgatgggatttagctgacttgagagcaccaagtctcctcctcctctgaggagagaacctctctgatcacagacctcagcagcccagaccctctggaggagacagcactgttgaggtttccctggggcctcctgtggctgccagccattttcttcctgtcacagccagaaaaccacacaaggagagggtttcagtgaggcccacatggtcctcctcaccaaataaacagtcctggattcaccacatgcacatgccaggtctggggctgtctctgtgcatctgattagcaggcagtagaaatgtgggtgttgccagtgttacggtgtctgcatcctccctgggggtgtgagatcaccccacgtgccttccactccaaccctgctcctctgttacctcttgagaggaggatggcgcagggcccgggctcctgactttgtccataatggctaaggatgctaattcaactgagagcccttttcagctgggtcctggatgtgagttgagcagtttcctcccagaccttgaggattgaagtgacagtgtgagaagaaatgcttcctgatagccgagcctcagcctagatgagcagaagtgggtgtaggaagtcattaataacagcagatgtctgtgagctcacaggaggcaaaggcttgggctggagggcatcttgatgccccttctccggatgtggctgcaatggagttttgtgacttggaatttggactttagtattaggcaaattactcaacctctctggaccccactttccttgtctgcaagaaggggataaagatatatctccccatggggctgttgtgacaattgaacgttctgtgactgctaggagtagtcatagttgtagtatgtgctgctgctgttttcatcagacaccagtaaaagttgacctcaacagaattttaggggtataaatttagggggtacaaataccgttctgtgacatggacatattacatagcggtgaagtctgggcttttagtgtaaccatcacccgaaaagtgtacattatacccagtaagtaatttctcatccctcatgcctcttccaccctcccacccttctgtgtctccaatgcctattattccatccacaccctatgtccatgtgtacacattatttagcttctgcttatcagtgagaatatgcagtatttgactttcctaaacataatatttttgaaggttctcctagaccgctaaccagcctcagggtggggcctccctcttaggaccattgccctgtgcttttctgttcagaaactataaagttctgaagtattgatggaaaacaaatctgttaactaggtcactttcgagatagggcagcacagctttcaggctcttgaagtccatttctagtttggcggtgcttgctgtcagggaacagatgtcaaatcaagtacttggagatgcgctcacattatcttttctctctgatctgctaaatgtcactgcatgcgtctgcgatgcccaacactggctgtacgttataatcacctggggagcttggatgcttcttgatgccatactccaccctctaagactcttgattaatcttggggtgggagccaggggtggctctttttcattaaggttccctggggattctaatgtgaagctagggttcagaactcctgagtccaggatgctatcagtggctgaatatcacactgttccaggcattcacttgaaagaagaggagaggcaatcaggcctctaactgagctgtctggtgactggtgacaggtagctccagctttgtgcattcatagaatatttaaaatgtcaatttcataaatttgctattagaaagctggtgttacacaattaactgaatggacaaaattccctttgaagtgagttcctgagcatttggtaaattttcaaggataatttatttaactttttgctgagcttcaagtttcttaagaaaccctgccaaatctcaaagtgatttttttagacatatgcagctgcttctgagttaacaatggagttttgctaggaccattaaaatctggaagcctaaaattctattttaaactcttctcattgtcagtgattagtcttaaaaaaaaaaagcattaaaaatgaaatcattttaaagggagctcattctaaaattctggccagaaaagcagggcaattttattgtaggaactattaatgattaataattcctctaagtaaagatatttgatgcccaaagaaagggaggggcatacctgaaacttcatctctgaccacaagggcagcctctctgtcttctgcttcttcagtggtcctggaggctatgggcactgcccctgcctgcccggggactctgccaccctggggcttggtggagcaggttgccctagctgcctctcttttgcatgtgctacctagttgcctcttactgcaatgtttgctttgggggtggacagaaaaccaggacgttatagctggttgcaagcataaggcatagcaatttgctggtcctgttttgaaagactgtgttttgaaattttgatttacaaaactgctttcatcaccattgaactacctcaaggcacaagttcaaaatggaagatactcaagtaaaagctgtaaagcaaacagcagcagttagagtggcatacggtaaatatgcgtccaggtcaagagccctcactggagaggcagctggaagtgctttcactgggaagtgggagggctgactcaggggctggccctagggtcagtggctggacactgtctccattggggtggcactgggagtagttgtctggacaggcagactctctccacaggggtgatagaaagcagtggtaatttctaaaagtgcctgcatgtctgccatcaccttcagcctcctaagagctgatgggagctggactcagggactgttgccccactgtggagacaaggagtgggtactccagccaagtttgcagtctcaaatcagggttgttttatttgtttttaatacattttaattatggaagtaatatttgcctacataaaaaattcatgtaatttcaaagtatataaagtaagaaaaaaattctctcttccttctccttaaagagaggcagacttagaagtttggggcctctacttccccacctcactgcacataatacatgacacagaccgcatgcatatagcttccaccctaagatgcccaacacaggtatttttcactgaaccatgtaccacagatatttcccatgtttttaaagcaaaatgttggctcttttcaataaattgccattataaaaactgctacaatggactatgcactctacagcacgtggacctctactttatagaggtctctccaccatgagaccatcagctccatgggtgcagcaggaatagggtctgtttctgccctctgttgtgtggctgcacccagcacagtgcttgtcccatacatgagcatgccattacttccttcttgaatgaaagaacatagagtaataataactagcatttgtcaggtgctttctgtgtgtgagacactgttccaaaggctgtgggtgaatacattcattcttcttcacacaactctgtgagacaggaacttgacagatggggaaactaaagcacaaagcagttcagtagcttcccaaggccatgtgacttacgtggcaaagctgggatttgaacccaagctctgccacagtctgcaggctaactatcattaacccctgcaaacacatgcccctgtgtctgcgtgctcgtgttcatggttttgtgggagaggatacaagaaaagggtctgctgtgtcagaaaggatgcacattttaggaacgtgagtattctgcctacccatagtgtgcaggtgtctgtgctgcccatgcccttgcttactccagcattcctgctgctgtctcacactgcttcgcacaaccctcccctagagcacagggtccgtactctaaagactagctggcttagagtgatcatggaatcatggggctgcaaggggttaaagatcctagagtcatttctctcgtgacctggtggtcatgggagagtcgtagtgatgacagtagtggtggttgattgtgccttgccaaagctgggcacattgcttttattactgtctccactgttcacctcttacaacaaccttacgcagtacaggtccaattattattgacatcttacaggtgtggaggaaactaaggcttcacagtatcaggtaacctgtccacagtcttctgacatggaagtgacagggctggggttagacctggcctgtcagagtccagagcccaccttttgaactcccacctgtcctgtcccatatggtagtgctgtttggaatcacatatccagtctgtacagggctcctgactccccctaaagtgccttttccttaataccctacttagatgggaagccaaaccctggaaacctttatctagcatgggttagctggttgttgatttagaacaggttcttaaagacaggtgtttgtgtaatagctgtggaaagggcacttcctctccgctgttctgatgctgagctggattcctagcaggaggggtctggggcaggcgggcgtccattgcgtgaggcaacctggctggcagggctggccgcgtggggccctggtttggctgctgttgctgccctctgctgcttcataatgaaattgcctgtgttcaacctgaaggggtcacagtggccgacttgcttaaagaggataagaagaaaaagaagttttgctgctttcggcaacgcagggctaaagatcatggtaaattgctgagactgagctttctttttccgcaacatctctgataccttttccttgcacataggcattgtgtgaagtgcatgtgccgtgtggtgtgttcagaagatgcctatattttaattgcttgatttctttcttcttgtctttttccaaaataatgtgcccttaccaagatagcattgcagttttctttttgtttgaactgtaccttataaagaagcagctgaaccaactcaaaaaatgtacttgattcggcatgaatattcttagactggaaggcagacttttaaaatacttttccccaaatgatttttttaaatttaaaccgtttagaaattccaataatgttatttgattgatttttttttctccaggctacatgtttcaaattgcttctctgtcttttagtctctggctactttgcccaggactatgccaaagctagtagtggcagctttaagaatgaaattagctggatgcagtggctcacacctgtaattccagcactttaggaagccgaggcaggaggatcacttgaagccaggagtttgagactagcctgggcaacaaagtgagaccctgtgtctaccaaaaattgtaaacaaagaagcaaacaaaaaaatcaggtgtggtggtgcatgcctatagtccccagctacttgggaggctgaggcaagaggattgcataagcccaggagttcgaggctgcagtcagcgatattgcgccattacactccagcctgggtaacagagtgcgatctctgtctcttaaaaaatcaaaataaataaaaatagacttcagggatgcaaagatttgggggcacttgcctttgaaagtgagaatgggctcgtgtgggaaagttatatttccagatatgtcctaaaatgatgctaaacatacccttcctcagaatccctggagtagctgtcaggcccatccccaggcagacagttaggtgagcagctggctccctgccttgctctgcccaagtcatggcagtggttcgacagcagcacaaagctttgcctatgcacaccagcacagtcgacccagttctgccaccaggatcggccctggtcacctgactctggggaaagtctgtttaaggagattcagacagcagggacgtgaagccaacaactaagggaacagaggggacacactgtactcttttctttgaagtggcctctggccccatgggaatgctgagctgagaggttatgggacgcagatgggaacaacccgtggatatctgaagagggttatattagagtctaggtctcatcagaaggcctaaaagtgaaaaggaattaagagattatcagatataagcccttgtcattcagcacgttgtggaccccaaaggagggagaagaggaggtggaacttgcctgaggtgggacagtgagttaggggcagagttggggctgccttttttatctgtagcattcacggaaggtttatgaacaggaggctgggcttgatgcagcacctgaaggtgtctgcaagaagaatggccttcagctaagcaggaaatagtgtcatggacataagaaaaaacatctttaaagactgacataggaatatagctctggagaggttaccaaaaggagataaatgatttctgtccccagaaaagaaaacacccctccttggttctgccttgctgaatgcaggcttgggccttgtgattctttaaggattcttgtgccttctccattgtctttctgagatctgcagggagaggaagcaggctgacacatttaaggaactttattttgagtgggaatggctttttattgactgaaatacctggggactcaggaaggactccgaccctgctggcaccaggtggggcacgagccctcatatggatgctgggctgcccctgtccctgaacacgcggagatagttattgtctgggcataattcttgcttgagacatggaaaccttggtctggccttgacctccattctccaagaagagcctggcttctttacagcagcaagaggctgttactctgtggtggcctaatgtgtctctactagcatgtgcatgtgcctttagggggtgtgtgggcttcttctggatttggcaggcctgtacgtcatggtactgctcatgtttgtcatgaaaataagatgaaaacatgaggtctaggtgtcaggtaccctgtcccctaggaaggcagccacaactcagccactgctcagttgtccagcctcaccccctacccttacctttgaaaagaatgagaagctttaggctgcttggaggtggaaggaaatgctaaaataaattcctgagtgtgcaaaaaagtctgtcctgtggagaacagaggagtgaggctctgaggccaaagacatctgtgaatgaggctactaatgggacaggttctagacgaggctggagggctctgggctcagtttgatgtgtggcaagccttcccttcggggtgccttgactggaggactgaggctctcctgtgacgccctgaggcctctggggagctactgcttcctgtgctgcaccccattctctgggacattctacatgcagagcacttggactcagttctccagtgcaggctgctggctggacccctggcttccctcctgagggtggtgggcaggggctcacttcttgtgccctcccctccttgcagagctgggggaatgcaagggaaaccccctggttgttggtagtaaaaccagccagcatgtgggcgtttctgccttcctgcagttatagcaggtcagaggtaaatggatcttagagatgatactgtcctacaactcatcttacagatctggtagccaagcataggggaaaagaggcacttgtcccattgtcacctgatgataagcaccaggctttcctgacatttcttccatcatttttgacctcatcagcctccatcactgaaggttgatctgagattttgctatacctgttaatggtgaacataattttgaggctgcctgcttaggacccacacatagactcatttgctctgtgtgtatgtgtgtgtgtgtgtgtgtgtgtgtgtgtgtgtgtgtgtgtgagagatttgcctccaaattcacaagcctgacacatttggctgagacgaatgtcgtccttcagcatgagagtagatggataaatgtctacaccttggtgaaaatgctagttgtgcttacctgagaagcagcagatttccctggtttactgtgtgtggcattgcccatgataacatctggcccagtgcaagatcttaaagagaagcaccatgacccacatccacagagtgctccaagtaggggcctggcccggctgcccatgctgcaaaggccttggaaactctaattacagtctgggacatgcagggctgctgtctgccaccatcctctcacccccagtggcacccaggccccccgccaccaatctcagtgcaccacactgtaagcctaagggtctgccctggagctcttcccagagatcccaatgcctggaatagattgcaaaatataggccttgagcttctccagattttcagcaggcaaattgcagtgccagcatcctctcacaggtcacaggctttcctaatgcttggtttttcccagactcactgaaagtagtttttaaatttatataaaaaataaacttctctaacaaagctctaacattccagtttcctgaaatgtgtcagggaagaggcttcacagcttgttcatgtgcagatggcccctggtgcttatttctacagtaggggactggcacttgtcggcaatgtggggaggtctgaggggtctgcctgcacctctaataaggcctagccacttgtcagcaattaacactgaatccctgctgaaggggacaaggccatcacctaaatggggcagtcacaatgctatggaagccagttaggagaagcccatgtattcgggtaatttgcccatggctttaccttcatgagtttgtatgactctttctgtctggatttttataaaagcccagtcgtcaccattgcagcctgatttttgtgctgtcgtcggtcactgagctgatatcctgtaagtgatctggttatatgccagattttgagtggttaataaaggtcatcagaatagtaaaccagcactggtagataatagactcgtttggctttttggaacttgttgatttgtggaattttaagtacataacaccaaaatgtataccagtgaaaccacagtacatacttgaaaagaatggtgagtggaagttaggagagatttctcagtgtcagctgtgtgtcccaaggcattttggcgagttctgtcctctgagaaatcaagagtttgctcacgtattctcagaagccccttctggttctaacagtctatgattcttttctttattttttaaaaacatagatgagatcctattggggctaaaggaagggaaagtcatattaattttttaacattaaaaaaatgaatgcctaatgcaagtgaagggtaaaatgctttatttttaataaatgaggtctttgttatacccactgagcctgatcttttcaaatatttttggaaaaggataagtgtgatatttcttctggaaatattttggaaaaggatcctgtgatagggagtaagtggctggagaaggtaggctgccagggccctggtcagagtgcgtttcctctgcccagatttaggggctggatcaagggctgtttccaggaccaaatgaggtctccaatttctagcgtaggcactgtcctctttctttccgtctgcctctgctcatcctcagccctggcaacatctttttgggatatatttatttattatgtgcctgtggctctttaggtgtcaaacaactatgacaggagaagttgctatgcctacagtaggcaaagttagacaataactcagctaaagacagagaaaatacaaaccaagaatgatggccaaagctgattcagaggtatggaagatggctcacactagatgcgtctgtgcaatgatgaaagtggccagggcaaaatgacactggattggtcgctttgcttccagggagctccaggagagcttttctgagatgatggagttaacatgtgtgggcctcactgatcatccagccctggggacccagcactccgcatgcctcatctcattcttacccttttacaggtgaggcaatggagatgtacagaagtcaggtcacaaacgcggggttaaacttagatctggccaacctgtgcacctgctctcagccactatcccaacccagctgaaggacagaatcagctcagagagcaggaggaccctgcctcaccctcagtggagccctggcacagtgctgtgagactatcttcccctctttgttgctgtttggggagttcgattttacttcttgtctttccccacagttagtctagggagcaactagaacatttcatacactaatagttggcagggggccagaaatgctaactgatgaccccattcccatagaaaatatgtaatttatctgtttcaatcagattgtttttaaaatgaagctttagaattgaaatgctgcaactgtaccgatatcagcatgagacatgactccagagattaaaaagccacaaagacttagtcttttcagaagtttgctcttttgaaaataatgactaatgttcctacatgatcaatattagaactatgagatagcaaactgttaaagatggaaatgaccctcaagattgtggagttcacaccaccattttagagacaggaaagtgaagcctggagagaggtgatccattgcccaggagactcagaaaacaggaccaggcctgtgggttccccacatcatactgccctcaactcctggtcccctcagtcactgcagtaaccaccacggaaaatgccgcacagagttaactcatgatcagatgtgaaaagggtctcccactgtgattttctttgttggatttaacaacctcctcacctttctgctgaatcagagtgaggaacagtcgaggagaattgcatgagtagcttcttgtgtgtctgtgtgtgttaatggagtttttttttttaaggtttttccatgattagagtcgtattttttgtttgtttttgtccagttttttttgtttgtttgtttctgcatgaaataatgaaaaagtaaatcaaggtttgtaattggtttcttctcacttaggaaagaagaaaattattctatgagagtaccagcaatgtaacatgagtctataattttactcacttggtcttaacttttgacacccttgcctcagtgttcctgggcatggcgtggaggctcccatgcaggcaggctcagtttctcgggcactcacaagcggaacggatcagggatcttctttggtatcctcaagaaacttctcagaccactgggttccttgagccaggttccacctctatccctgctgttacctttatgaagtctgctatgagcaaggcgggccgaacacagccccctacgcgagctgcctgatccagctcctttccccctgagcctgggctgggcctcagaatcttcgccatagcgcttccagcccactaccagtatttgcagatgaaacttgaggcatccttgctaaggggagccacacgggcagagcccatgggccaagctttcctgaagacatcgtaaggtctgtaaaaacagtcactacagttcaaagccatgcctcaggaaaaaggaagtacacgtggattctcttccgtgacttcctcttttacctctgcaccccggcagaattaatccttctttactctggaacctcctgcacagacccctgaggtagctctcttcacagctgatggaagtgagctgggggctgcctgtccctcacccctattccaggtgggtgcagtgctgtgtgccctctttttgcccctgccctcctccactgcctgggctccagcacgtgttcgtgatgtttatggggttgaatcaagtggatgagaaaagacgctcgtgcaccagatggtggccctgggtggaccctggacctccacacactagtgggcgtgtttccacatttcctctacttccgctcaggatcctaccatggagaagtgggatgggcccagagaccctagtcatactgagaccagagtcaaccttgccctctgctcactggttgataatgatcttcttcttccactcgtaacactataattccttggtgctctagttgttcttacccagcttactgggtaagaactttctgtgtattggcttcacaagctcagcagaacttcagcatcaggtaaaatagcaaaaaaatagagttcttaactctaaaaaatgttgtgcatggtaccttcatgcactgccttccccattcacaatagctcttctccctcagtatatttaagatgattgactcatgaaatgttagggttattcacagatgttctatatgcaccttttggggcaagcaaagatgtacctgtaaagtacattttggtggcttctcagtgtgatcccagagatgaggaggataaagtggtgctatacccagccacaggattcactttgatcccttagcttcctttcttggaaatgtctagggggatagaatgtcctcctcgagggggactgtgtttcctacaggccatgggtgcagagactcgcctgcagtggagatgcctggctccttggcactcccttagcccagctgaggccctgagggcccttttcaccctcctcctgggttccggaggtctgcctggtggcagaggctcccacctggcctgcctcccaggcgtgcagtgtgccccgcatgctctctgaagcccgtcttctccccacagctagcatgcccaccagcgagactgagtctgtgaacacagagaacgtcagcggtgaaggcgagaaccgaggctgctgtggaagtctctggtgagtgtggggagcacttgccctctttcccctcctgttgtctcagagaagcaggtggtgaggaagaccgcccaggctgcagcagagccccgggccatcgccttgggtgtggcgggtgggaaggctcctcgtaccccacgccacgcttcctcctgtgccagggctatccctcctgcacacctccccaccccccgcccccccgccccccggcccagcatttcacatgcctcttcctgtaagtagagcccgtgaagaatgtggtggttaacctggccacctgctgtgtccattaggtgctggtggagacggagaggcgcggccaaggcggggccctctgggtgtcggcggtgggggtaaaggcctgattctccttccagcctgggtttggcatttgtgcttttgaagaagagcttctgtggcagagttgctgactagaatgtgctacgtatttaagttttcctttgctcatgggaccttcctaacctcaggcctggcggttggatgacgaggccctgccttcttggtgcctggcactttttccctggagccctgcaccagcctctcctcatgatggaaggcaccattgcattaacactcactggcttttttctagatgatttgggctgtggcagctggcgggggggctgggggggaccagcagtgcagaatgtgctgggcactgtctgccgtgggggagccctgtgcggtttggttttgtttgcttcttgctggtatccttcaggtcttatctctgtaaagtgcaggtgtcatttttaagagaactcaatcttactcttggcagagtttcataaaaatgatgtgttatgggcagaatatgcaaccatttgtgaagtgattttgcctccattctcttgctctgccctctctgagacatcatgaagcagacagagaatgggtttgtcatccccactttacagatgagaatgctgaggcccaagacctgctgctttcccatactcacccagtgggagaatggcagtgctgggactcctagtgcagtgctccctctgcggtagtagcagcaaatgctgctgtcgagatgagtggcaggagagactctgctgccttcattttggcccctgcatcactgcctgctgccagggcctgcagggaatctggccgagtcttccctgacctgggcctcgagggtgctcagtctgctcctctggccctggcagcatcctaatttctgctctggccttgcccctgctggcctgctgtggtaaccaggggtgctaagtccaggctgtatgcatggcttttatgatatctcagctgaaatgatggggagtgtgtgctcaagccctcggaaccagaatcttaacactttttgtctttctttcagtcaagccatctcaaaatccaaactcaggtcagtatcttctttctgtttcttcgtcagcctgtgtgttgcctttgtatgttctcacttctgaattttacgtagtattgctctggacttgagttttcctctgtggattataacattgatactgaattgcagtcagtcaattgaatcctatgagcctggcttagggggagatcttaggtgccaaagatctccctcaaagtaaaccaataagactcagtaacgagttttgcctccccattaatcctccttatcctctgagtcattttcctaagagagctgctgcttgtcacttttctgctcgaaagctttccatagaaagggagttcaagaagtcttccaaggtactagcatttcttgatgtgcatgcgggttacgtgttcagttggtaaaactcattgaaccatatacctatgattagtgtactttttcatctgagtgtcatttttcaacaaaaacattttcctactatatataaacactaacttaaaataggcaaagacctaaatataaaatataaaatcatgaacattccagaaagaaaacaggagaaagtctttgtgatcttgagttatgcaaaggtttcttaagatacaacacccagtatactttctgtaacagaaaacaaacagataaattggtctttgtcaaaattaaacttctgttcttcaaaagaaaagaaaaaggttagcttcagacttggagaaaaatatttgcaaagcatatttgataaaggactggtatcccatatatataaagattaatgcataaaggagagtgtcaataatagaaaaacccaataaaaaatgggcaaaatttttaataggcatttcaccagagaagagatgtggatggcagataagcacatgaaatgaccatcagttgttacaaaaatgcacattaaaatcacagttagataccactacacatctattagagtgaatcagatttaaatatctgacaatgacaagttctgacaaggatgctgattggtgggaactttcatacagtgttgatggacatgtcaaatgacacagccgttaaaaaaatagtttggtagttcctcataaagtttaaacatatatttaccacgtttatatttggcccagccatcccacttctaaggtgtttgtataagagaaatgaagatatatgcctacatacaaagttgtaacatgaatgtttgtaccagttttattcatgcttaccccaagctggaagtaacccaaaggtccatcaaatgtgaatgggtagacacactgtggttcaccagtatgatggagtactagttcatgtctgctgagttatgcatcctaggagaaacccagctgtgagcgggacagtctttagtgtccttagtagagtttttccacgctggccaacatgttagaagctgctctttccattggaacctgcacagcaagagtaataataaaatacaccttacttgatccaggttttggtaaagagttggcacaactctttctctgctcacttcctgggttacagattttctttttgcctagcaacacagctgagtcagccagggctgcagcttgggtagcctggagattcctcttgactcaggcccccagaggaagtaccccattgtcgttagtgaggcagcacagcctggagaggactgactttaccaattggctgacctttccacgggatctgggtcactgagctgcagctcatggcacactttaccaaagcatccccttgtggcagggaaggttttctagaaggagacaggctaagggagagaatattttctctaatcacaatcaggaactgaaggtaggtggaggacatgctacttgtctgtttggctgagctcattttatttttatgaaaacacgattcaatattggctcttctcctaaaggtatattttgagcatcactagttagaaagggcacctgatgactcagtatgaagattcatgtcctactcagctttgacaactctgccaggctctggaggaacctcagagatttaagaaaggattgaaaaggttccctttaaaaaaaaaaaaactagctttgtagcactttgctgcctggtaaattctgtatggtgattgagatgctgcaagagatgtgtataataagcgaagtggctctctgcactgattgcatgagcagatccacgtcccatatggtggatataggaactgcatatgtgtgcaagtgtagttttgcatctgcacgtgaatctatgaatatctagattttctaacccacttaagggctgcatatgacagattctggagttatctataagccataaggaaggactgatagcatgatcaagtcaagattatacttttaaaagtcgcattttaagaccaacataatttttatgatgaagtctgttaatttctgtgccatttgtgctcatctttctttcctgcactcccaccccaatctagacctccagagtgaaagccaaattatctctcaatcatatttattggatactcagatgctgtatctgtcatctacgtagtaatgtttgcttgtcttttagccgacgctggcgtcgctggaaccgattcaatcgcagaagatgtagggccgccgtgaagtctgtcacgttttactggctggttatcgtcctggtgtttctgaacaccttaaccatttcctctgagcactacaatcagccagattggttgacacagattcaaggtacaagcagaggccattccttttttgttctgaactagagatttctgtggctgtccaactgccatttggtcttatctgatcgctgcatgatgaagtatcgcaacatttctagtgaggacaaacttggtagaaccatccagacacagcaactaccagagcgagggtgccatctgtgccgcgtggtgaagcaccttggagccacttaatgccaagcatctaattgtcctaaccctgagccaacctaggaccaagaattcttgaagctggaagggacctcgtaatccctgctccctgccctcatcggggaagcttcattttcccctatagtacttctggcaaatggttttggttcccctgctttgaatgctccagcactggggtgtgggacactcatccctagagacagcccattctgggtttgacagttttgagcctttgaaaagtccttcctttcatccagtcaaacccgtttccctctacctctccagcctgcttggtgatattttcagctgttagaaatgacattgataggtgactgcttctgatatcgtcatgccataaatgaattcagacagatcttttctgtgtgattgaatgaaaaaatatgtataacctgatggtgtcaacgcagaatcgtaggcttttagggctggaaggagtcagagattatgtgatgagctgccccttcccattttgtcatcagtgacactgagacctggagaaatcaagtaacttctccagagtcacacacatagctagtagcagaagcaggaccagaacctggtggacagactgtccacgcgaaggccacgtttctgtcctgagtgaggtagtgaagagagagacaaggtattggcgtatttcctgtggggcctgatagggagggaggtgtgaggggcacgagcagtctgagtgtcttgcaggagaccctgaggatgggtgcccctttgtctttccagatattgccaacaaagtcctcttggctctgttcacctgcgagatgctggtaaaaatgtacagcttgggcctccaagcatatttcgtctctcttttcaaccggtttgattgcttcgtggtgtgtggtggaatcactgagacgatcttggtggaactggaaatcatgtctcccctggggatctctgtgtttcggtgtgtgcgcctcttaagaatcttcaaagtgaccaggtaaggaaatgtgggtcccactgcaaatgttttatgaacatgaggcggcaaccagtcacatccccgggcaggtgatgttctgctctgtcctgcatgggtgttctgagctgacaccctcatcttgacttataggcactggacttccctgagcaacttagtggcatccttattaaactccatgaagtccatcgcttcgctgttgcttctgctttttctcttcattatcatcttttccttgcttgggatgcagctgtttggcggcaagtttaattttgatgaaacgcaaaccaagcggagcacctttgacaatttccctcaagcacttctcacagtgttccaggtgagtcctccctccattccccgaaaagcacttcgtgagcagcagctaaaactcctctgccttcttgtctgctcacactcaggaagacaaaaggactccatttttgttcatctctgccctaatcatagcctggtaaattttgtgccatttaagttattcgttctgcatcatcctccagctgtctatcttaagtgatgtaatttttttaaagacttctagctacattacaaaataataaaccaaaaaaaccgtttttcacactcaagctcttccaagaaaactttttgattgattttatgaggtttctttgaaatagactctaaaattcttttctctttggtactttttgatggcaggccagttcataatcctagttataatagatttacacaagaagtgaattctcatgcctccatgctttggtgtgtagttggaggaatcagagtggtaggaactgtggcagccattggtcccttctgtcctcctcctgggatgcagtgaggacacaaagattctgagggtgcctgtcctgtggggcctctgcaggcagtagctgagaagggagcggtggttgcagagaggcaccgatggctctgctgctcagagcagcagcacatgctcccctgactctacgctgaggtgctcaaaaccctcctccttggacagggtctgatggggaagtttaaaagacccacctgtcctcattgcttttcctgtgtgatgtgagctgcagagccctgccagagaggaaaggcagcagacagctgggtcctgtggtggccctttccatgcccagctctctgctgtggatgagtcacttacccatttctgaagaaatccagagaccaaagggaatgatctggacaattctctcccacttggtcattttcaggtatatataatctgctgtaagccatagtattgttgtttgaattatacttaaattttggctgctgatcagtgattcttttttaaaaaaaaatttctttcagagaaactggtgtctttttttttttttggtaatgcatgcatatggcacaaaattctaatgttacaaatgaataataattctcccagccagccacaaatttcctcttctaggaagcaaccaccattaaacagtttcttgtgaattcttagatctgcattttctgatagctacaactcagttaagctacctataggagactttccacagacaggagctcactgtacgtgctgttttgcatcttgcttttatcactttgagtgtcctcaagagccttcctgcttggtccataaaaggctgcccctcctttgaaacgctgcgtccatgcggtggtagatgtgccgttgttcatatgaccagtcccttgctgacaagcattgagttctgtctggtcttagcccacatacacagggctccagtaggtgaccctgaacacgcatcagagggcacatgtgttggctgtagatctgtgggataaactcccagagatggaattgctgctttagagggtgtgtccattttaaatgttgacacacgtgcccaagtgctctccttatggttgtattagctcattgtcttcacactgcccattgcctcactgcctctcccctcagtggagagcatgctttgggatgcccatcagttaggtgaaaatggcatttcattgtacttttaaaagatactgttcttatcaggagtgaggttgaacgtcttttcctatgactcagagccatcagtagtgccttttctgtgaattactttatcttttcaaatcatttgcccatttttgtttggttgtgatccataacagtttaaattttaaaaatatctagttcagattgaagataaaggagctctgtctgtcgtcggaagatagcatttttttcattactgttcttattcatctgattctatttcatcatggattgaattatcaagtatgatcagtagagaagattaaatttcaggtcattggtgatatctactcttgaggtagttttgtaaatttacatgagacatttagaatttcctgcttttgtaatttcataggtataattatccatttccacagttgatggactatgtggaatgctatgcagcagttaaaagaatgagatgcaccttctgacacagagggtctccagagtatgttgttgaatgaaaaaacaagccagttgcagaaaactttgcatagcatgatatcctttatgtctgaaaactcagagaagacacctagtgcttgttttctttgtgtgtaaacgtgtttaaatctgtagttgaaggttccagagagacacagaaagagcatgctttctggggaagggactaaaactgggctggggtgtaatcaaaaagcacataaatcttggctgggtgaggtggctcatgcctgtaatcccagcactttgggaggctgaagtgggcggaacacttgaggtcaggagttcgagaccagcctggccaactgctgtaacactctctctactaaaaatataaaaattagccgagtgtggtggtggtcacctgtaatcccagctacttgaaaggctgaggcaggagagttgcttgaaccggggaggtggaggttgcagtgagctgagatcaagccactgcactccagcctggcaatagagcgagactccatctcaaaaacaaacaaacacttaagtcttaataataaggttattttttttcactcaaagaattatctatttgtgtaattaaaaaacagtgttttagaaattccatgggataacagatggatttgttcagtgcaaactggactgtgaaaggcagcttaaaccagatctaggcagccaccgaggggctctaagagagcggctgcaatttgtgaatccacctgctggctgataccagtttggcttctcagatcctgacaggcgaagactggaatgctgtgatgtacgatggcatcatggcttacgggggcccatcctcttcaggaatgatcgtctgcatctacttcatcatcctcttcatttgtggtaactgtatccttcaagccgaccaggctttgttgttgccgtcgttatctggttttgtttttcttcctctgcatttctctgtggtgatggtggtggtagtagttgtggcagggaggtaaatgcctttaccttattagctcaatatctgcttttcttccatgctgctgggggacagcgtcctgtaagcagaattccagagaggctttgagggatgcgctctggctaagagaagcaagcccagggaaggagcgtgagacagcacacatactggtcccagaggtcactcagtttggcatcatgtctcctgtacaggtcccgagggatggctgagcgcaaggccaggtggttctttatgttatcattattgggagcttaggcgtccatctgtgacttcctaagacccttcgtgactgatgagagccatctttgtggactgatctgtgctcccctgggctaatttcactttgctgatctgtccatctttgcggatcaagtgtccattggctagctgctaaatcatgctgcataacttctctctgccttactttaccccttttccctgtcgagaggcaccctctaatcctagacttctggaattggcccttagatctgtatttacctcattcagacccttcctgatcctatagcctttggttctcggtgttttatctccaggtcctccatgcctagcaccagacctggtacacagaggcctttaatgaatgtttgatgcatgaacgacgtacacactcatgatactacatctgggttttcacccttccattttaaaaggtcctaatctggattctgcttctaaggtggcccagatctctgtaggtgttttcttctttatcttgtctggctcactgataaattttcttcagtgtggtaacctcagtgcaaacctgcccccttttctacaaggacaatgctttgtgctataaggtattttataaaaaccccatctcaacacatatacatccttgtagtcccttgactcggctctaaggccccctccacaagagccacccctgccctgtctcccacccagagaaggttcttctacctctgagctccccctcagattttatccacgtctcttactgcctgtaggttcttctgtctactggatttttatttatttattattattattttatagaaggagtctcactctgtcacgcaggctggatggagtgcagtggtgcaatctcggctcactgcaacctccgcctcctgggttcaagtgattctcctgcctcagcctcctgagtagctgggattacatgtgtgcaccaccatgcccagctaatttttgcatttttagtagagatggggtttctccatgttaaccaggccggtctaaaactcctgacctcaggtgatccgcccgccttggcctcccaaagtgctgggattacaggtgtgagccactgcgcccggcctgtctactggaattttgagtgggcattcctccatctccctaactagatggataagcttcttgagtcaggaatctttttgtattcacatctctcaatagagtacgggatcttgcacatagttggcccttggtaaatgaaaggtcattattttctttttctgctgtcctatggttgactctttaggccacagcaacatcctggacttgaatctgcagagaagtattccctggtgcttgtctgtggttgcatgttgttttctttatagcacatgccactgtatcagaggtgcttagggagctgcttatgctctgtcttccccaactagagtagacattccagtgtgtggtgtttcttcctgtgccctcagcacccacaacagtgcctgacacattggaggtacttggtagatctttctggatgaattccagagcatgccactctttaggagggtctgagtaatgcctctcaatacagatgatggattttgctctggaaagttgttacaagcttgtaagatcttcctgtggctcatcactctggatttgctttccactacccaaaggagttgagtgtcatggcaagactagagagattattgtttcttcactgagatcatggagggaatactcagtacagctagtctcatcactagcccctgtccgagttaccattaccccaggcctagcagaggaatgctcatgttaccaagccatctccagcccaggactaattgcttcctgaggctcattgcagctccagttaaaaaataggccagcatgtcaaaggctttttgagtcttaatgtaattcacttacgtttctctcctctttaaaaccttgaatagattagtcaggcgtgctattccctcacagagatttcatcatctgttccttgttaggttatgttggtttacgtgttcagcaacccatccaagacaacaaattgcacagggcgtatgggacagtgctatgctgctcctgtctcggggtctctgggctcctgcagttttgcctgcagatggccgggcatcaggcagagagaagcatttgtcacagaagggggccttctcacttattgccctctcatccctgtgcttctcaaaaacatgcttcactgctagtgggtaagaaacaggcatcttctgatttaggagtcttgttcagaatacttgttaaaaacaaaaacattcaagaaagccatgtatacaacattagagtaagagtgaaaaaatatgataatttgttcagtcacctaaccttttattgtgttttttaactggaactgcaatgagcctcgggaagcaatttgtcctgggctggagagggcaaaaatcaagttcaggtacagtgatcaaagatcgagctgcagtgagactattcacaacagtccagcaccaggtggcagtaagtcagacacattatagtcagtcagtgtttgtggagtgaaggaatgaatgagttatctgtagactctgaaggttatttcaaaggagaaagtctcatactgtcttgtgcaagggcatcatcatttgaataacttgcaacctttgaagtggtctgttttggaaagcactcccctgaatatatatgttgtagttgtagtatgtgtttaaaaaaaaaacccaaactactttttaattataccatgtttatgttatagattgttttataaaatgtataacatagctatagatacgtagatgtttggacacacacacacacagagaaaggttgaaattagtgggttttcatgggttttagtgaatcttaattttacttctgtagactgtccttttacaggtttttacttttgttttgttttgttttgttttgttttgtttgaaaagcagggctctggtactctagttttgctgtgtgagtataacacttgggacggtcacttactaccagcttcccgggatgcagaggtgtgtggcgttgccattgttggccgcacgtagttgcatttagtagtgtgttgtgcccttaaaaagttgaaattagatattctactgaatgtcttcttggccatcgctgtagacaatttggctgatgctgaaagtctgaacactgctcagaaagaagaagcggaagaaaaggagaggaaaaagattgccaggtaaccctattttcccctgacgtgtttgtccaggggctgtgttgggagccctgcaacagttgcagcctgccaggcttacccccgcatcacggcagctgcagcccccgggttgctgctttgtggatcatggttgaccatgcactgcagaccaaaacggatggaatcttgggcagaagccaggctcttggctgtcatccctcggggctgagagtgggagtcacgtgtccccatgcttaaagaatcactgcagttaattttggtgtcataaaataaatgatgcattcaatgctgattagctctcagatgagaattttaataagatggtctgtgtaatgaatccatcgcattgagattaccaggaagctctgagtttgggttgtgctaggctcttgtggttagtgttgtttctaattaaattctgtccttcattggagcattattgattcagaatcctgattagcatttttatacagagtaacatggttatttggtttcttgtgctcttttctcttctctttagaaaagagagcctagaaaataaaaagaacaacaaaccagaagtcaaccagatagccaacagtgacaacaaggtatgtattctaagatgcttctcccctttttgtttcaaaatgatcctgttgatctccatacatgtaccatttacactgtggaagtgtcttgtgtatcattcttgtaatattttggtgtgaagaatatggcacaccatatagaccctggcttcccaggggggattctggttgaatttaggcagttagttgtgtttactgatatttcaccagaaaaccaatatgataaagaattgactagtttgaccacttatgttttctttattggaattgtgcaatcagccctgacccgtggtcaggatcacgttagcatcttctgagtgggtatgaaaatcgcggatttttaatagatgtctgtttccagaggtaatcccaggatcaggtggcctcagggctatactgtaaaactgaatcccatttatgacagccctggttgttttgttctttctctgttcatcgagttgataaatgcttactgagtggctatcatgtatcagacactgaggattcaggaatgaagaagacaggtccctgccttcatggggctcacagtctggcaggaagacaggagtatgagatgcattatcacatggtatgagtgaatgtgctggcacagggcaaggacagagccctgaatggtgctggctaaccacgactgggtcagggttcagccttcttctcacctgccctcaggccttctgtctgaagcagaatcaccatctggggacatctgcctgtccctgcacactcaaatacagatgcagctttggggaggaatccatgccctatgctggaccaccagggtgacttttcctctctgaagtgattttaagtcagtctcccctcctcccaagatgtctttgtcatcctaggttacaattgatgactatagagaagaggatgaagacaaggacccctatccgccttgcgatgtgccaggtatggtggcggaggccggagacgctggctttgctgtgtgtctttgctactgctctgtgaccacctgccgagtctgcggccagccagcccagcagcgtgcacatgagctgctgaggccaccaaggccgtgggaccagttagctcgcctttttcccatggtcacaggcagaatgtgtcactcaaattccaggtgatggggagggaaagtgcaggtgggtcagggcagtcccagcttctgctgggagactggtccaggaggccccccggtgttagcgctcacctgacacttttatatttgactggcacatttattggctgatgtgggtgggactgtggagttgggagcctaggagctgattgagactgaaagtcccacacagtttctcaggctagtctgagcgaggaggttactggggaaacagccaggtgttgggaggttggcagtgagaatctcagcactgccacctttcatctgtggtcagatcttacgctggtgggaatctcatcattcccgcaaactaaacatgctcaccagacggggacacttctcagcaccccccacccctgcaacacacactcagtccatgttctgaaggagcaggagggttttgattcatgtaagcaggtagatgttgttaaagtttaagccaaatttgcatgtgaaattaagaataattcaaacccatatgtagtctttatttcatgcctataaaaaaagtatttcatttaaagtaggggaagaggaagaggaagaggaggaggatgaacctgaggttcctgccggaccccgtcctcgaaggatctcggagttgaacatgaaggaaaaaattgcccccatccctgaagggagcgctttcttcattcttagcaagaccaacccgtaaatactccccttctagtctctcacggctgcctcttgccagtgaccctacaggttgcttgagggtggctcgggtgggggtgaggggaagtggttcacagccctttctgaacctgagtgtccctggcgccctcacccaagtcccctccaacccctctctcctccactgttgctcttgccctcagctcatctcttcctagctgcctccttcccacaggggtgtggccaggtcctgggaggagctccattctaggttctcctccctgccttcacccctgcatggggacagcaatggggaaagccttgtccaccccagcatattccagctggagctcactgctctggtgttccatgcttcggccagccgtggaaatttttcctaatgagtggatcttctgttaggatgccttgtgggatgagaatttttgtgaccaaggtccgcatagcatcctcatcctcatagatcccccacttgattgatcagttttcccaattgagttttatctttgtaaagtcatattgcacagtgatattttatgggttgtaagtattcagttcagctctatgatagtctacttaaaatagcatttctcatgttaaaatgataaggtgctcacaaggaacagggtaatgactcacaagtactataagaggaagacgtttatttactagctagtttctaggttttaaatcatctgggactgagtggaatgccaggggaaataaatggctcctggaaaggtttctagaattgcagaagtagttcttggctgtcagagaacaactctttataattcattggccctagggagacacaggtgggaagcaaggcctgctggcatcctcagagatatgaagatgtgatggtagcttttacagctcaccactgtttgggtgttctttaaaaaaaaaaggttattaaactgatattgctgacacctacagccctttgtgtgtgtgtgtgtgtttgtgtgtgtgtgtgtgtgtgtgtatgtatgtatgtatgtatatgtatatatatatacatatacatatacatatatatatgtgtgtgtatatatatatatatatatatatatatatatatgttgagggaatgcatttattttcacctaaagctacaaagcactcctgccctcactagcttggaagttctttcccagactcaactgctaaccaccttcaggtcctcaggggggtacgcccagcattaaataggcccaaaagggaggacttgaagtgaggggtcgccttacataaagttgactccagtttgaaagtggaaaaaatcttttccaaggaaaagctatctatctataatagtcttatagaatacaggaatacagataggtatatatacatatacacacgtatatactttagaatttaaacatatacatacatattttagatatacatatatacacacatatactttacaatttaaatatatgtgtatacatatatttatgtgtatgttttatatatatgttttatgtgtatacatatatgtacatatacatacataaatacatacatgtgtatatgtatatgtttaaattctaaagtcaaacattgagggtatggataaccagttgctaaccaggcgcagggcacattgaggacagcagcgaggttctgatggcccagagagccatcgtttgagcccaggtgtcaggcatgagccaccctccattgcttcacgagaccacaggacttggtgagaactctcatgccgggccatgagatccttgcatgttagcaaatgatgctccaaccttcactttctgaggactgcttgtgggtcaactccaaaatttaaaaaaataataataacatctattacaaaatctgcagacagccagagatgtcctgaagtctcagttactgcaggtcactataaatagtatgaccttgcacctgcaagacaagcctgggattcatctcattctgtgtgaactgttgagggcaggcctggcctcagtttcctctctcagtcagggaagataaacagatgagtttcttgtcatagtggaaaaacttcagtgatgtagacctggatcgattctgcccctggtccttactagtgtcactttagaattctcttattaagcctcagtttccccatcttgaggaagacaacaagccccacttccaaggacttggcagagtggtctgtgtggcacccccagcacagaggtgacacaccacccacagtccacaggttgcctttggtgggcttcgagaggctgacggacaggttgctcaggtgtgccgggcagggtgcatgggcagcacagcagacagctgccctctgcctggcctcttgctgcagtggccccacactcttaaggacccagtgtgttccaccctatctgggactgtttccaagcagcggcttttccctgcaggatccgcgtaggctgccacaagctcatcaaccaccacatcttcaccaacctcatccttgtcttcatcatgctgagcagcgctgccctggccgcagaggaccccatccgcagccactccttccggaacacggtaagtccccagggtggggctcgctctgggatagccctggcctctctcgggcagaggccactgtagagatgggagctgtggaggccctcaaggtgacagctagagtaggtctttccttcagctggggacgttggctgtttccggtttgtaagtgccagagagcttgtgttttagctgggtaaatctgaatggaatcattaacttagaacttcatcttaaatactctgcaggaacggtcagtgaattcagggagcctgcttctccgcctctttgctccctgctgctgatatttaggtcctcctttccctccctgctcaggtttacactcacccctgttttgagattcatgcctcgtggaagcacacagcagggaggaagcagaattcaaaccaggcacaccacatgcccaggctgtcttgttcagggttggaggcaagatgcctatgtcgtgtagacttaaatacaccaagctgctaggctccacgactcaggagaaatacaagttagggagatgataggatgtcaagttgaggtgttcagtggagaagaacattaggccaggtgcactggctcacacctgtaattccagtgctttgggggatagagggggaggatcactgaaggacaggagttcaagactagcctgggcaacataatgagacctaatctgtacaaaaaataaaaaaaattagctgagcgtggtgtcacatacctgcagtcccagctactcaggagactgagggaggaggatcgcttgggcccaggaggtcaaagctgcagcaagcaatgtttgcaccactgcactccagcctcagtgatacagtgagaccttgtctcaaagaaaaaaaaaagaatatataatgaatgttaaaaaatttcttctctgggaagatttattataaaatatgtgattatgttatatatttcacaagtatctccaaagaaagtgctgaccttggccccagatagccaatattaagtttgagtaacttcatgaagcagagtgcaccaggcagagccacttggacccttaagcatgttaacttagcggtttacaatattacttttcattggtagaattaggaatatacaaagagttattaattggctgggcgtggtggcttatacgtataatcccagcattttgggaggccaagacagtagaatcgcttgagcccaggagttcaagactagtctaggcaacatagtgagaccccatctatataaaaatttaaaaattagccacacgtattggcacatgcctgtcccagctacttgggaggctgaggtgggaggattgcctgagcacaggaggctgagcctgaagtcagctgtgttcacaccactgtattccagcctgggtgacagagcaagaccctgtctctaaaaaaaaaaaaaaaacaaaaagaactctagattttggtgtggcagaggtggctatccagttagccctctgtatccatgggtttggcatccatggattcaaccaaccacagatagaaaatgtttgggggtggccaggcgtggtggctcacctgtaatcccagcactttgggaggccgaagtgggtggatcgcttgaggtcaggagtttgagaccagcctggccaacatggtggaaccccgtctctactaaaaataccaaaaattagccaggtgtggtggtgcacgcctgtagtcccgactactcgggaggctgaggtatgagcagtgagctgagatcgcaccactgcactccagcctgggcaacagagtaagtgagactctgtctcaaaaagaaaaaatattttgggggaaaaaatgtactgaatttgtgcagatttttttcttgtcatttcctaaataatttacatggcatttacttgaccttgggtatcttgggaaatctagagatgatctaaagtctacaggaggatgtgcatagattatatgcaaacactacaccattttatatcagagacttgagattttggggtctgagagagtcctgcaaccaatcccttatggatactgactgtactaagaaaacaagtcaagggaccgggagcagtggctcatgcctgtaatcccagtactttgggaggccaagacaggcagatcacttgaggtcaggagttcaagacctgcctggccaacatggcgaaaccccatctctactaaaaatacaaaaattagctgggtgtggtggtctgcacctgtaatcccagctatgcaggaggctgaggcaggagaatcgcttgaacccaggaggcggaggttgcagtgaactgagatcatgccattgcattccagcctctgcgacaagagcaaaactctgtctcaaaaaaacatacaaacaaaaatacaagcaagtcaagggttttctattagttagttttgtaacttagagatggtgcccgctgactgtgtctgtgttgtaaggaaacttgcacctaaattggctcttgcctcagcagccccaccttagctgtgcagcttactcggcactgaggaccattcaaaggcaagacggctagaagcagcagcctgttgactctcaggcctagatattatcgtgcagtttcaggttattaccaagaaacccgaccagcagagggaggctggcgagtgtgcaagcatcaggtgtccctggcttgctggtgggcacctttttctgagcaccaggttgttagagattttagggttaagacacacctgcagatctgtgcctccaggactctgttgggacaaccaagcctcatgctgttgcttcccatttctggagcctggcaagccctacctatcagatttatgaaacacgcactccgatatgaagagaaaaagtgctttccccatggtgcgtgttagtgtcaatataaagaggaaggcactgggcctgtcttgatttgtcctcacagattagggtttttgttagagagggtttagttgctctagatgccccaatagaagaaagacctctgtgtcatttcattccatcataaaaaaaggacacaagggcagtgtttggaaaaaaacagcattaggtgacaaactaggccaggagctagtctaggattcgcattgacaagggattaatttacatgggggtttcatgtcttatttttaattataactgcttctccataagtttatttccctgctgccttacccaaaaatgttaccgttctgcttaaatagatgtacatatgtgtatgagtattgctttttagattctgcagtgttttgtatgttttttaaccttagccgaattcttagtttaaaaaagagagcgagagaatgcaagcagagtgagggaaaaaaacagcttaaatttcaacttcagccctggcgccaggttgccttgtagacttgtgggctgcagtgtctttctgggctactagatgctttccatgttaatattcccactgtgacctaggaaggagtaaggaaaagttggctgaggcctggcagtgcacgggaagacaccttccatagcctggccaagaaactccattacacagaagtggtcccacagaattcataagtccaaaaccagaaacagtttggaaagtgaataccctctgaagagagagactgggcttgaaacagaggtcctcgcattattgtgacacagcccccaggcgactcctctacctacaacagctcacccctgtgactcttcgctggcatacgccaggcctactccttgctctgcagtgcctgtgactagctgcgtggcctatgcgtgtgtccactccctgctcccagcagccacatctgttaaaggattaggcctgggtggtctccacagtcccttctagctctggtctcttcagttctttcaaaaccatagatcatagttgtcatgaagatcagtggccaagaccaactcgcctttgcagataagggtgctacggtcagaagctcctggtgagcagctttcctggtggtcagacttcttgctgctggcccacttgcctccatggctccgaggagaagcagggaccccagaaagggctagcaggactctgctgatgggataatagatggtattgtcaccaatgaggatagagttgcctggactgaaaattcaaagaccaagtcagtctgttatttgagtgggcccagcaaggttttttaaaaaaaaccctgagtttagagagagcagtgtgagatgcagaacaacgggcaggagtgctggagaccaccaatgcaggagtctgtaaaaccatcccttgcagacttagccagcccagcgcatgagcagggaagggtgctgacgccctgattacacaggctggaatgcgagggggcatatggaagctactggctccgacagatgccgctgccatcttcatttatgcttctccaccaatctgatgctcagatggagggcaacatacttcattcagccagaaacgcggttaaaaatcgaaaatgtgtataagcctctaatttatttggtgccacaagtcgtttgtagatgtagcactctctgatgagaaaagcttgttaacaaagcactcttagaaatgagcctctctgcctgtccaagacacaagactgggaagcaagtcggtgagtggttaaaggaggtcaggattctcaaacgctctttgggaatgatgtaattgaccaaagtgggcattcacccgtggctctgcacttaccttcagaatggcagggttttcctggagggatgggtctctgactggatcgggggtttctgcctgtaagcatgcagatgtcagagtttgtctgaattccttttctcactcccacatgttgtgccttgcagatactgggttactttgactatgccttcacagccatctttactgttgagatcctgttgaaggtaatgaattttccttgatcttcacatactccacagcagctggagcaataatagttgcacttctttgtttgccttccagatgctaggttacgcagactatgtcttcactggtacttttgcatttgagatcattttaaaggtaacaggttacccggcagtgtgtttaagggctgctcctgcgtgtgacacacaggaaagaagcgtggagtgcttttgattttttatgggttttttttttgtctttcgtggttgagctaagttttttttttttgttttttaaaccgaaggatttttttttcctgtgaccattccaacttgtttttgctctttttaacctttgaatgcatgtaggagccactctggcttcatgatagtggttgagaattacattttgctcatttaaaaaaaataccctctgtaatttgtcaactgataacacatatatctctatgtgtgaacttttttccaccctttctgacatcaaagtcagaggaaaagcatttatcctatgaagaggatgtctctctttttgtttctctgactgcattatgcttttggggacctaaaatagtaacacactattttcttgcaataggatttgcaagatgacttgggtctatttgtgttaaggtattttctgtctgttttaatggatgggcttacatttacacaaaaggagcgccctttggccggggtgacctaaatgtactgcccatgcatgagctaatggctgccattgctgcttgtggtttgtggactgactgtgaagtctgccccatggggagcccattccttatgtgcttagagtgctggagaccacagcagagctccaagaacctatccaaaactggccaagaaccacagggcgtgggtcattgtggttctgggagaacgtggcccatcagaactgtcagggcaaccatctcctagcaggaagacaagctgggaaatgaagacttttaaccatggttttctttaagccattggggaatttttgtgtgtgcaattcaggcaaaatgtattttgcatcggactactgtggaacttgggctctttacaaaatcttatataaaatgaaacctcaattaatatggtcagggaatgaggtggttagttttttgaggttggtttttttatttttttattttttggttcatgaaacagcataaagccaaccaacaactgtttacccctttcttaaaagtcttctaaaaatgtgagttcattttcctgcctttaagccgatgaatttggttgacacttctcctaagtcagaggtgtgcagtgggatggtgaccagctcttgttgatgaggcctctgtgggagggcctgtggatgcagaatgcacagtggtgggggtcggagggatgccgccagaacactcaccggctcagcttctgcctcagcttcttggttttagaatttgacttcttttcaaagtgaatggggagctgttctacttagtctgttagcctggttaattgaggttttattttactctccacattttttagttgttaaatgaatatagttacccttgggctttggggaaaattagacacaggattatttaaaaggaaaaaaatgattgttactttttaatttcggtagaattgcttcaccgacttaaatcttctgagtcattcttcattttgaaggtattttagagaatggaaaataagctaaaacaagaaggattcagaaaatggagactcaccaagaagtgtctaatatctgagacgatggttcctggtggccttggggacatttggaaggctctttggttatttgcttaagccctatgaaattgccatttttgtaggtcaaaaagggttgaacactggcgatttcataaggttcaatgtaatatttcccacctctacctctcttatactgtacttacctgagccttctccaaccttttttgttttaaaataaatagtgagctgtatatattttgctatttttactttggggaactaaactctttttccatcaccaatagaaatctcactgaagcacccataataggtgctccaggtacatgtggcaggtgagcacagagccgttgagactggctcaggtgagatgccacctggcttcctagccatgcctggcacgtgtcatcagacttggaggaattgcttaagatggatgcgtcattaaagaccattaggaacaataaggggcctctgtggaaaagtgatgtaggtccatagagcctgggagccctgaattcaagcccccactggaaaggcttaattgaaacaaggtaggctctaccagggcctcagaggggccagaaccagcactttgtggggaagtgggctctccggacagcacttaccttttgacgaatgtagtcctgtggagcctctcttagacaggctctttggacatgccaacagtgtattcatacttgaaacctgtgatcactgtaataaagcctaaattggtttcttcttttaaaatgtatccaaaataagctgcccctttttgatttttgtttgaagaaattatcctgtggctcaaccccgttggtttacatttctgacttcttaatgcacacttgttaatgaagttatactttcctcaagattttgcaaagagcccaggtttcttttcctttggagacaaaaaatggtaaatcatccatgattctgcttctagatgacaacttttggagctttcctccacaaaggggccttctgcaggaactacttcaatttgctggatatgctggtggttggggtgtctctggtgtcatttgggattcagtaagtattctggggtgtgtgcccagaattgttgggctgaatggtttatgtaagggattttaacataattgataaaggctgggcatcattttcatgattatatttagttatataggtttatttaatttgctcccattccagaaagatttaaacaattcatgttttcttgtgtgtgtgtgtttttttctttttgtgcctgctgctaagttgagcttattactgtctgtgaaatttgctttcaactgaggtgaaagaagtgttgactaggagggagggaatctaggttctagtcctggttcctccaaaggctgattccagggccttgagggcatcctctctcaggaaccctgtgccccttttatataggaggggctgggaccaggtggcctttcagtttttccagcttagatattgagaacttcctttgattttcaggatatagaacctgctaggactttttctttggcctcaaaatttttcagctaggagggagccaaggctgaaagtcagggccccaggtcttttccatggcatttagcgatttctggtgggaacagccattgctgagtactgcttaccatccccaggggtgtggggcagaggctccagtagagcatcaggtgtggccttgctttcttgctggcctgtgagcacttctgttcaggtgctgagcatagaatctcccctgtatgagcacacatgcacacacctgccctctaagctaaagagaagtggaaaggacctgccctcctaggaagaccaaaaacctctgcttggaacagccctttgtgttatccttctcgcctgccactgagggaaccctgtgatcatagcttggaaggccatttgcattaacatctttgcagctcctattaactcccaggctgttcatgtccaagctgcagccttgcccacttcctcctgagcatgtgttctggccacactcagccacctagggtaaagcagaaagctgcattctcttgtgtcgcatctttgtacatgctgctccctcacactggagcccccctccctattgtcctcgctaacccctactcctcctttgggactcacctggctatcaccacccccaccccagagtccttcccaggctccccctgccccacccccacaggttgtgctcccctggctgagcacaccacatttacccctgtcatgtgccacactgggttgggattgcccatctctccaccagactgtgagctccttgaaggccagagaagccctggtaccaaagtgctacagcagacctccaaccttaaacaaaaacaaatgatatatgaagcctaaaagccagctactacctagtatttacagtgagtggaaagaacaaagagagttcgtgagttgtgtctctgccaaggttagctgtgcacctgtcagcctctgtgagtgccatgggctgggcttgggaggtgctgcctcgtgtgggcggggaggagaagtcgcctctgagtcgtgaagagagatcagctcagcaccacatggatcccacgctaactgtgcagggatactaaagtgaagatccagtgaaagggtgaatctcaaagcatcctgtccatttataacacgctctgcctgccgtctttctgctccttccctagatccagtgccatctccgttgtgaagattctgagggtcttaagggtcctgcgtcccctcagggccatcaacagagcaaaaggacttaaggttttgattcctctcctcccggctgggctggcttgggttggggttggctgtaattactggctcttctgggcagagctgagctgaggcctgatggatttttaaagtgagttataaggacctttctaaccaattcagccacctgtgccaagtgctaatggcattttaaaaattattatttattgtctttatttttggtaattgaagatatttttctttgtaattattgttcatttattacctttttattagtagttctttgtgtttattttagtcttttatttagtttatttagtctttcagttttcatgtagactgtataaaaggctactgggtttctgttttcctgagtcatttatggggtggggaccctttgggcccatgtgccaggcagcactgcacctgtagcatttcttctttttttttttttctttgaaacggagtcttgctctgttgcccaggctagagtgcagtggtgtgatctcggctcactacaacctctgcctcctggggtcaagcaattcccctgcctcagcctcctcagtagctgggattacaggtgcacaccaccacgcccagctaatttttgtatttttagtacagatggggtttcaccatgttggccaggctggtctcaaactcctgacctcaagtgatctgcccacttctgcctcccaaagtgctgggattagaggtgtgagccactgtgcctggccaacacagaaactgtcggctgatgttagctcacctcaaggccaaaatcacaaagaagagtcacgcccctctgccctctccgcagcacgtggtccagtgcgtcttcgtggccatccggaccatcggcaacatcatgatcgtcaccaccctcctgcagttcatgtttgcctgtatcggggtccagttgttcaaggtagaggaactgcctccaagcataaaactcaggtggatttctttaaggagaagcctgcatttacttaactgcctgtctattttatacccaggggaagttctatcgctgtacggatgaagccaaaagtaaccctgaagaatgcaggtgagcgtcctgagagtggagtaggggacttagaagagcaaatagcagacttcaaggattcacacatgttggcacgtcagaagttttggtcgtgaaataaaataggcctgtgtgctcagcttgtgggtagatagatggtgtttgtttttcattgaggtgaaattcacgtaacatcaaccattttcagtatacagttccttagcatatagtatccatggcattgttgtgcaaccaacatctctatctagttgcaaactttttgtcatcccaaaagaatggctagatggcttttgtggtggagaatctataaatgatgggagttgggggaaccctgaaataacaattatgaaatgccccaaatagcttccatgacagccatgtggatgatttccccaaatcagaatttggaactcaactccctggtgtttgggaactggctccctcttcttatacactttctagacttcctctctcctggctcctattacctacatcttggccatatttccatagacaagaactggcagaggagagacaaggtgggagatattcatgcctcccattccaggatgtccagtgaccatgaaggcagtcatggaagccattgcctaaagtttcagactgtgcagaggcctgtgtctccccacccgcgagagacataactgactgggctctggctgactgtgcctgtacattggtttggggtttattttaagcagaaggtgcagtcagagagcaccaattgcaatttggctgtgtctctgcacctccagaggcaccgttcacacaccgttcatggcgtccctggaggtgagcagcctggcattggcgtgaggacactgtttcttccctcttgaagcctctgtgtcttcatttgtaaaataaagatattgcgctttatctcttgggttccttccagaaatgaagttctgggagaaataatttgccagaaataatgcaattctttcggaaagaaaattgggaatgtcattagtaagaagagaaagggatttgattaaaactaaaatgcaggaagagtatacgtgggttcgtttcctagagcctacagagttctctatggctgagctttgatccttcagagcgcgcctcaagcccattgtgtaagagatgctctcaccatgctgtggtttttatcggccaacgacgtatgcccggtgtctgggtggctgctctggagaatacacgttgcactggtagttattcaatggttatttgagccgcgaagtagattaaatggagggcgaggagaggagaaacggcgccggtgttatgctcagctgtgtgacaggcgggcggactgagtgtgacctgcctggaggttggattggggcagtgtgtccaactttacgctgcttccacctgtcatgtgtgaagccagacgacccacacctgttttcctctccaggggacttttcatcctctacaaggatggggatgttgacagtcctgtggtccgtgaacggatctggcaaaacagtgatttcaacttcgacaacgtcctctctgctatgatggcgctcttcacagtctccacgtttgagggctggcctgcgtaagtacagggagcacacagtcttctggagaggcacctgcgtgcccagggctgagccctccctcctggagtcagtcccatttctgttctccagtgtcgcaggattgccctgtggctttttaaccttgggccacttctcagtcacttcttgacccacagggcctctttctgtgtaggtggatgatttgtgaagcagggttggtagaggtgcctggcagcatctctgggtggaagcagggaggcctgagatgcctcagtcccatgaactcccattggatgtcaggaaagctgccatccgctgctcccaaagagggtctgaatggtgtcccaaaccattcattcattcattcattcattcattcattcattctaatatattcccagttgcggacagttgctgttatgccatctcttttactgagcacctgctcgctcatttacagaccatgctgtgcagaggcttgtgtctccccacccgttaaaaatgtctaactgggctctggctgactgcgtgcttagataccagctctgtgcaacatggcatgttaggcactgtggaggaaacagtgtctaaacatgcttcctctcctcaagcccaaatcaaatcagtgtcaagtggtcaaaccaggcaggtggtctggtgtgtcctagatgtgcagaacagggtcctgaagaatggctaagatgttgatgggtaaagtaagaagagcaggtaaggagaagttagaatttgaaagggagaatcctctgtgctttcgtgttgctctttgcttctggagctcccacccccagctcctgccatcagtgtgcaaacacacctagagtcctggatacccggtccccatgcatagatgagctgcaggaggtgggcaggctggggctcgcaggccagcagagttcttggggtgtgtgtaagagtcagatattttcaggagctcctgtaggataaagagacagtcaggtggggcttgttcattagggatttaatcctgggagaacagaggcatggagtaaggcccttcactgtgtgcaggcacaggctatagtgtcaggctttgaacactgtacttgagcaaatcatggtggcagctgaggagaaaggagcaaacctgggactcggggcttggaggaactggctcaactcctggctctgcccccaaggagtgtgactgtggcactttgatacctccctgaatattcctatgatggggatgatagtaatgtctgccttcccagatggatgtgaggattaagggagaggctgtgaaagtgtctcgggaagcctatgcatgggctgggtgccccagaagtgttgaatctgcatcagaatggggatcaatggaccccaagggtgttacagtaatccccctcttcctgttaagagttccgctaggcatagctttaattttagtgcatatctctgtttggggaagcacccttagttctttggaactactctggttggtcacttactgtcttgccagtgtgcatagttttcacttcctccagtgtcttacacgtgatattcttcctctctgaatagaaaggagtgttttaggatatttgtgaaatcttttgattttcagttcctcagaacagtccctcgatgatgatatcctgggtgccccctcctcttagtgctggctgtttgggcctgaggctgatgggagagacctggttgtgtccagcagccttggggtgggttcccagcgagtgctcatgagaggagttctggagagggaggacctgggaaggcagcgggctgggccgtgtgggctggggggcttggcaggtcctcacttggtttttctctctctaggttgctgtataaagccatcgactcgaatggagagaacatcggcccaatctacaaccaccgcgtggagatctccatcttcttcatcatctacatcatcattgtagctttcttcatgatgaacatctttgtgggctttgtcatcgttacatttcaggaacaaggagaaaaagagtataagaactgtgagctggacaaaaatcaggttaaagtcacacactgttttggcttctgtcccttggtcaggagcggagtgccttctttattgactgatttcccccatacccagagaagggcacccacatactgtctgtccctggggctagggccctgttctaagcacaccctcagcccatttgagtcatcactgctgagcgttaggtttcccgatacatatgagactttgtaattatgaaatccatcgccagacctggtggtatgaaatcagagagtgcttacgccacctgccatggtcatgacccactagtgatgtatcagaatcttagttggggtgctgtggccactcacacagacattcacagtccctactgggagatggtctttaaagccacttagggcagtttcttacccttggtgctattagcatttcagtctgggatgattcttggttgtgtttcctgggctttttaggctgtttagcagcatccgtggcttccagctgttagatgccaatggttcgtcttcccctggtagcagtaaccaaaatgtctccagacattgccaagtgtcctttggggggcaaagctgccccttgttgagaactgctgaccgaggggggaataccctgcatcaccccagggaagtcagtaactttgaatttgggactaagattgtattggcatcattcttgatctgacaccgtgttttagccagtctggtagaagtaggagccttttgctcgggtgacgtggtgaggagagggagccctgtgctctgggctatcttcctacacctgcactgtgaccctaggtgccctctgatccctgctggggcttgatccctcatctctaaatcgagggcattaaggagctgctctttagagattccttgcagccctgaaagagtctacaagatcgagattcttttctgggagtttccccgggtcctctatcagtagcatctctgttttgatgacgacgtcgcaagcaagaatgatctggtagcctaggcttcctcagaggaagtggcccaggcacggcaagccaaccatagctggctgtacccactgggaaatgtgagaacatgccggtttgtgtttgcaggaagattttcctttgagttgtcagggtgtccctgtagactccaccagtgattgtcagggagaggtctggcccagcaatttgctcacccaaggaagaggagtgtcagagcaaggccaggccagccacgcagagccagcgctgaaagtgtgtcagcctctgaggtccagcacaggcttgaattgggggtccctggagtgagcatgtgaggtcagagcagcgccgggtcccagacactgggaacctgtccgaagcctgcacccagagtcaaagcaggagagcgggggtaggtctaggctctcaatgctgagctgagggctcttggggctagaggttccctctgggcctgctgcagagggtggaccagccccactacccagagtaagtgagaaagtgctccagctgggtcccaacctgtgttcaatccaattgtcactacagtgctccagctgggccctaaactgcgtccaatcaatccagctgtcgctacagtgctccagctgggccccaacctgtgttcaatccagctgtcactactgaccacatcctagggattctgaaatgaacacaacaagctccccagcccagaagctccccgatggacatgtggatagctccccataagatgtgtattgttaacacactctggctcctgaagggtatctcatgtggttccaactgggagcatccaggaggctactagtcttggggaatgagccagcccctctcgttcttgtgagtttctgtggttacttggcctcctttcctggaggacagcacaggcaggggaactataggtgtgatccacctatagatcccccgtatgtgtgataaagaggaaaggcagtgataaggcctggacccagtcctcactcctgcttgtgtatacactgcagggcctcaggaaagacagctaaaagctctgagcctcagtttttagtaagcaaaatggaagccacatgggtaggcacccagcttacccggagcttgctgggagggtcagcgaaggtaatggaggcagggccctcggtgactcaagagtggtgccagcagcaggaagggggtcactcgtaatcattttcaccatcgtccacggccccttcccgggagctgtagggtgagctctttcagagcagatgaccacggggtcctccttccctgcaagtgctcagaaccccgtttctgcccttttctgctgttgcagcgtcagtgtgttgaatacgccttgaaagcacgtcccttgcggagatacatccccaaaaacccctaccagtacaagttctggtacgtggtgaactcttcgcctttcgaatacatgatgtttgtcctcatcatgctcaacacactctgcttggccatgcaggtaaaaatggagacagccgtggggatcaggtccgggcattccgcacagccccgtgccccaaatgctgagggtggaatgctgcccctcacaggaggggtttgatttttctgatgagtctgggctataggttggccagagttctgttctggctgacagttgtcacggtaggagtttaagatagttcttttgttgaagaaattatccgtacagcatgatggtaggtaacatttccatggagcctggcattggtgctcaattctgtaaacatttaccatgggcctcctgtggccagctagtggttgagaactacagctctggagatacacagctgtttcaatcctgattttactctgaattttttgtgacttggggaaagttgtttaaattccccgaggcttgatttctttatcagtaaaatggggaaatctgtcacacctacgttagagataaggtttatgctgtagataattcccctcagacactttgttttttattttttgccttttgtttttgaggcagtctcactctgtagcccaggctggagtgcagtagcgcgatctcggctcactgcaacctccgcctcctgggttcaagtgattctcatgcctcagcattctgagtagctacgattacaggcatatgccaccatgcccagctaattttgtatttttagtagagacagggtttcaccacgttggccaggctggtcccgaactcgtgacctcaggtgatccgttgcctcagcctcccaaagtgctggtattacaggcgtgagccaccgcgcccggcacctttggacactttgatctgggcctgtcacagagtaacactcaatgttggaaaacaaaacataagtcacactcctgtcctcaggtggctctcagcatggcagtagggaattttccagttgatgaagtgttgagtttgacctgagttacagctacttcttattccagtgggggcaagaaatgcaattgagtttaattggccaagtcagattatagtatggtattaacagcgaatgttttcaaaagttacattgcctagtagatactctacgaggacaggaagcaaagaccaaggtctagagccagcttttgcactgactttaagaactccagcacatcaaaccagctctcagtgctgtctggacagtaggtctaaagatagggataaattttctggcatttttcttaacctaagagttctttttgaatgaaaaggactgtgtgctgacgtagaagaaagtgtaaaatcaagaaaacactgccttttattcaacataaacttacatggcataaaatttatccctaaccaaattctacctctattcatagacattttggtggtatctgcattgtgctctggtcaaggccctcaacataaagccctgccagaagaaagggtgaattccctttatcctgagcagaggaaatggatatgttttcccccttcatcattcaatcatcctcatcttgtcacagaccctcctgcactttgtgggagttcaccacatgaccttgcaatgccggtggaattgcccagcgagggtgctgggctgtggaggatgcccacaggggcacagagggctgggagcctccatgtgcaagcatgtgagatcgtggctgaggctctgagaacggtccctctgtcttcatccatagcactacgagcagtccaagatgttcaatgatgccatggacattctgaacatggtcttcaccggggtgttcaccgtcgagatggttttgaaagtcatcgcatttaagcctaaggtgagttgcagaacccacttttcaaaggttgttgctgagtcaccctagagaagtacccgcttcctgttagtcttgtgttactgaattatgctaaagtgttctggccgctaactgggttaccacctgagaacattaaaatctgattagagcatgtgtgtatatatgggaaaatgaatctgcaagaacaaaacctcatgaaaacaattctgagaaacagaagcagggagattagaattgggaatttgtaaactgcagattattttgaaagccagttttctgtttctagaatagtacatatcatgctgtgtcagggaaacctgcctcattacttgagcactagagaaaatgtttgaacataacccatcagaaagaatttgaccctgattatactttcagatatctagtctaaagactttgttttgtttgttcttggtctgcagcatcctttttaccctttaagggaagtgctgataccagctgcagacctctcacagccataccatcttttgtttgcttaatttagaaaaatttcacttgactttaacacaaaatgagacatgaaatgtgttcaactgtgctcgacgactcagcgtgttgtacccctttgggagggagtgaattcagttccccacttgtcagtggctgccagatgaggggcagtgtagttcagtgtcaaattgcatagttgtggaactggactggattcaaatctctactctggcacttacagctgaaacaagttcctttcttccctgcgcctcgacttcctcacccataaaatgaggacgctaatagtgctgtttcatggggttgtcatgaggagtaaagagttcccatatacgcactgcttaacagagtgcctggcatgtagcgccacgctgcggactgtcggccactgctgttcctacccgcaccaccaccctcatcatcatcaagcaaggatgttccctcattctaaaagcctagacagaagagccacaccaagctgaaatgtgggatatttggccctcattttctttcccagtacagccaaaaactctcagagttagagatgacagagttcagtgacccagttagttatctctgtgtaaggtatctgacgacactgatttaattaagttaggcatggattatgaaatggatggtttcacatactccatagttacatgaaattctaattccaaactgttcctttctttaatttgaattaatctctatgcaatctttatcagatctttgtggaccaaaaagaaaggacatttgtaagtgattaattggggtgattgcagtggggtcaaatttggcacctaatgcatggccagatgttattatctactgtgacttgtccatatctacatacataaacatttcctccttttccaaattcatcttaatttcctttgagattttggtttgcttccctctcacctttacttctttgaacaatatttgtctggactgatggaaaaggttgcaaagtaagaacatcgaaggtacttgagaaatgcaacatggaacctctctgtggaacatttcccagatacctgggccatgtcttcccttgccagatgattaagctctgaagtttttgaaagcttgctctaggctgaagagaaagcacactcacccatggtgtgtatgtgtgtgtgtcagtgtgtgtgtgtgcacatgcgtgtgtgttcatgtgtgtgcttgctcccttcagccggccagtgcattgacagcccagtagtgcactgcccagtaggctgacagttgcccagaagatctccaaacctgggaggagagttcagtagcgcgtgaacagataggcgataccaaagggaagtgagtagctaagctataatcagtactgatagatcggagtttttaaatggttgatttttgctggaaattgtactgcttgtagtttcactcagcaagatatcttcatagcattagacaacctcacgttacaattgggagaacttttaagacagtagcagcagcatctccacacttgaagagcactgtcactgcgttccccccggccaggggaggttgagtttatatcgtgtgccgggatgagtgggagagtatcggttcaccaagaagcaatgccctccttaaaatttttcctgccctttttttcttgctcttctctttggtgttcacaagcccagcccgagcaagtggtctttcacaaagaagccagggaggcctcctccctcctggtcggtggggtagtcgggctgaagaacaaggttgtcaaggctgcagaaggaggaatattctgaggagatggccacatgggacctcagcctcctctcaggagagcctttgtctcatgggaggagctttgtaaaagggtccctcatggcagagttctccactgagtcaggtacaccttctagcaggactcgtcagtatctctgttaggggacacaggctggcagagtttcagttgcttcataaaataagtatagaaagtgaggtaagacaaaattcttactggtaggtgagaaggcatttcaagagggaacggttaaagaaagttgagaaatctgaccttaaggacttattttatgtaagggagcttgatggagaaactgggcctcctaagagagtatatttagagggaaatggcccaaggtcatgggagatgagatgacccagcctctgccaacccagagggaggtgggaagtagacagagggagaaaactccgagctggaagcctccatgatggaagaggccatctcacctcaggggaggaggcattttggagcactggtcaggcaagagtggaaggtagttaggagccgaagcgcaaaagcatccgggaaaagcaagcaggtgatttagccgattgtgggttcccgaagggaaagttcaccagctgggtgttgacctggtgcagcctaggtcctgctttcaacttggggtcaactagacctctgtagggttttcaaaagcaggccctagtttaggtgacacaagccccattctccaagcctttccctccagctgctagaattctccaacaagttctcttgctccaaggaggaagattgattaagaagggcctttttcaaagtgctggctgcagcaggtatagagagcacttctgtggagtaagaagagcctggtctgtctgggattctctttgtgggatgttacccatctggcgttttgtccaggctgcattctaggccatgttgtttgctgcggttactggccttctccagtgagccatacttcgttcccatcttagtcctttaaagtgttttgatcttgattctaccctgaaaatatactaatttatactcctagctacttgggctggaaaaagtaaggagaaattaggtttggggaaagaagaaagtgttttggtgctgtcctcatgctgctgtgcagagctgatgcagaatgggcactgagtcctcatctgccttcaagggctctgttcgctgctccagggtcccttgcaagagtagagcttcttcatgatcttcctagagtaccttttccacctgctggagagaaaatttgacactgtttttttttcagttcttcatgaccccatctgttctagatttacttttaatggcaaataatacttgaaaccaagtattactgtccttagaactttacattgggcttcttgttgggctccatcctgtccttttgacattgaggtttcccagagccctctcctggtccccttcttgcctggtaagatgcatacatgccagagcgtcagtggccgcctctgtggcatgcagacctgcactgcccttctctctcctgagcttctatgcctccctgccttcaaaatgatctccctgcctctggcctcagcccttctacctactccctttgtaagcccaaagctgaccagaccactcttgcagtgatattttggcactggccacctattgcttgagaaagcatatacaattttcttagtcgaatattcaaagtcctccatgaagcactggcccctgtatatttctgcctcatttcctgccattccctccctgctatttcttcgtccccaccccatccccaggtgttggcatgctagacctttccctgcccatgcgcctctgtctagataccctgcttcctctttgttatccttgaaggcctgtgggaaatgttatcttctctgagacagcatcctcaccccagccagagccagccctgtcctctgctcatgcatccgttgggggcctactatgcaccatcgttaccaacactactccatgtctgcctctctgtttgttggtgagcagctgcttgaggtctcaggctgagtcttctgcttctggctctgtggtacctcacatgatgcctggtggtagcttcctggtggtagctcagtaagattggtggaatgaagaaaggaataaagggatgatcctggaagtgcagcctctgggcatgagacgatacctgcttttctgtcgcagggtatctgggtagagcagagtggagcacatcttcccttaattccccgcttacctttggaaaggcttttgctagttagaaagctgtcaggcatagtttctaccaaaagttggcactttgggttatcacttgggtcaaatgctacccaaataatccctgccagcatgggtaagagatctggctgccatgatcaatgacaaaaggcacattatttatataggcttctaccgatctgcagatgggagtgaatccaggcagcaaaaggaatctgaacttgggtcacttttcttgtttcccatttgcaaccgttccacaaacattgcccccttaccatgtgcaacgcctgtgccatatcctggcaagagggccaggaataagagatgtgccttccaggagcccactgtccagcaggagacaaacattgatggatggtgacaatagggttcttagacatagtggtgcttcctgaccctgaggcccacattagtctggtttatgattttaaatttccagagtcagaaatgtttctgcgcaatacatattgcatgtggctgacttgtttggtcttttcagacaggtagagctggacacaaaaataatatagatttgactgctggttccacttgagaggttctggcctcagaattcagttgtaggagaacacatcatcataggccaagaggagagagcagggagaggggccctctgttaggagccgtgtcatttcttgtatcttatcttctggttacaaaggcaatatggtgcctttggtgggagaagggtgggggaactgagtcatgccacttgacggtgattttattaaacaagaggctactaaatagggaaacagtatgtgggaagaatgggagggctgacattttctccctcccctggactcctgtcagagccacctggtcagagcctgtgatttcagccacctgccttctgcttcctagattaagggtgtcaaccttcagtccatcaatcattccaatttgggcacagttttatgagtgtgaggggtttctggagagagagtcaatgaaattgccaaaaaattccaagaccccaaggaaatattaagcccctattgtgttgatttaaacggattttatccatcacagtgcaccagcattgagaatatcttataggctgatggaaatggcctgaaggggagaacactgataattctggagagagggagagaggagctgttcaggaataaaatctcaaagtcagaggctggcctccagcacccatgtggtgggtttggcctttgggaaatgacataaataatggagagaagcggcgcacacggtacaaatgcaggcggggctggggcacgcaccacagcaggtgcgaagggcgaacgctgggtctcctccgccttgtcagtactctggaggtctagttgctacttgtgaccaagtttttgatcaaggtgtaaattccttcctagaggggaggggaaggatcactgtgctttctttagcttttgagttactcttaactccatgaagaaaagggcaggctctgcccctccaagtgtggtctgtggcactgccaccagtcagagaactgcttgttatccattcgcaacaagagctgtcagctctaacactaagcacattgattcagctggctttcttgttaggagacttcttggacgaaggaaactgctgtgttcccttacaacctgaggctagctcttgatctcacctctgactgctagtctagacctcaaaggcagcccatctctgctcagttttgccagccaagaatcatgaattcatgcaaaggaaagctagaaagcataagctgtgctgtttttaaaatagcccttcccattagacttttatacatagatcatcagatttggggctcacaaattccttttgtctgctgatagatgggccagggagggtagcagtcagtgagggtaaaatgggagagaggcactgtgatcatagggcggggagagaggtggagagttggttagaaaccacggcggttgggtgggggaatcttacattattaagattaaatttaagaagcaaacccgaagtcagtgtcgtagctcccccataaatgcacctagactgatggatggtgactagaataaacatccctactccagctgttaggacagtcagtacgtccacatcttctatactgtcgcaaaaggctgtggttctgcagtggcttcttctgggtctgtgtttgatcacaagtttctgggacctgacacctcaaagtactttttgttctggttttcttaatgcagcactaaatgtaccccgttgtaaacaggctgggccccattttatataatatgtacctgaattttcatttccaaaaagcgtccagactctttggaaaaacacagttggtttatagacagagctgttgatcttgacagtcagtccgttgcctctttggctgtctgtgcagtatctccccaccaccctctccaaccgggagcttcccaggggtgtcgagagaccacaggcactcatttagcacctgctgtgctgatgctggaagaagatgtaaaatgtccggcacatacatatagattttaagttacaattgtggggatgttgtaccctcaaaattgttgcaagatagcaggacctgaacaaacaaccagacaaagctggatgacaggcagggtgcaagttggtggacaaaggggacattgcccatgtcaagcactgactgggttcaaggctctggctagataatggggttagggaagttgggggactgaatatgcagcacagtcatcatccttcagggcttttgattggtagagctgcagacaaagaccccacattcagccatcagtacgtaagagattcagcgtcagcctgagggagtgcagacagccgggactgcgaaggttccatcagggaacatttatctgaccttgaagaagggtgaagttgaacagatggagttggggttaggcaattaggattgcagagacatcaggaggtggggaggaacctggtgctattttcgaaggatgggaaggactcctctcagcctagagggtgaaaagtgggagggaaagaaagcaaaagctgagatggaagaaggagcctattggcttctttgaaggacagagggagccctggaacatcctcttcattccatactcttttctactatagagcctgccttgacttccccacactaagcaccacccccatgacaaggagccagtgtctctgccacgacgctgtgcctcacggtgcctgtgtccccgtaagccattatctacccgtctgtgtcgtctacactgagagttctttgaagacagggacttgtctcagtcatcctgccacaaggcatggcctttgtaatacaggctggacttgcgaggactggagagcattgctggcccatttgaaggagcacagaaatggaaatgtgtgcaatacctggtgacagtgctctttaagtggggtgaatggagattctaaggaaggagtccatcagatcgtgagggtttgggatcatccctctgggtaccaggacaaggttgccaaaatgccttcctctgccctgtagatatcctgcttggtttggtgccactcaggaccgtgagtgtgtgtgtgtgtgtgtgtatgcacacgtgcgtgtgtgcgtgggcgtgcaccttctctcacacataaaggtgcacaaccaccctgctgtgcccctttccaccagtggacagtattgttacttcccctttggctttcccaccctacctgggtgccatgggtgcggcagggactcggattcgcccctatacggtccgtgtggtgggtcattcatacatgctcataaacatctgccctcgcctgctctgtccaggggtattttagtgacgcctggaacacgtttgactccctcatcgtaatcggcagcattatagacgtggccctcagcgaagcagacgtgagtatgcacctggcgtggccgccacctgtgtcctctctcctctgtctgtgcatactccgctccctgccctgcagtggcatcacctggacaagtcacagatcccagtcacttgatctgaaactaggatttcctaatgagagctgtaggcaagacgtgtttcagggtagagccttatcccagggccttttgtagacacaaatcaccttttggaggacaggcctttttgcagcatttaccctggtcactagtaggcaaggtaagataggatgtctctaattgttttcatttgctgtgtcagaagtgatacccacagtggcgtatctataacatgtttattttagggggatgtttcaagtcgccgtgtggcgcgatgctagaatgttccccttttgtaacactgtccttttcttcttttttcctgtggtgcttcctctcctctgtggcttctgaatgcttgccctaacagcactatttcactgatgcatggaacacttttgatgccttaattgttgttggtagcgtcgttgatattgctataactgaagtgaatgtaagtagcaaactttgtgtcctatatcatggttgttttcattaagtctgacatagaagagactagaggccctgcccttaaatctccacacactttagaaatccagacacaaatttattttgaaagactaaggataatttgtagtttcctctatctcaccccatctctatctccttcccctgaaaaagagtggggaagtctatgtagaattgccttttggaactagaatagtatttcaaaagatctaattaaagttataagggctgggagttaattgtgtgtccgtgtgaatgttgtcactcaccagtcgtgtgaccgtggaagtcatccgagtgctatgtgcctcagtctttccagctgtacatggagttactgatgtgcaccctcgtccccgcaatggttctgtgagggcacaggcaggagaccccacagccagctatgccctgagcctgtggtggctgctgctggtgccctcacctgtaccgtgtctgctctgagtctgactggtgacactggtgaacgtcccacacccaaagggtgatgccagccagtggaaggctgcttggggccagggaaaagagggccgagtgcaaaccagggagagggtgtcagtccgcctttgttacatccagtagattcacttgagggggaacaagtgcagtagtggcattgtagatggagtgaaccactctccctagaagcactctgagcacctctccccctgcaaaattaagaagcgtgagaaagggagcccctccttctgcctggctccccttgggtctgacccatgctagaccggaaggcctcaggcaggcagaaagggccctgtctacctgatctgttcccagttcatcagcaagtcttagtgggcgtccagtgtgtgtgccgagcctgtgcagagcctttcgagagagtgggcggagcacggggagggactgttgtgtggtattggcttttgctccacaatgtccagcccaccccctgcccctgatgctctgcctggtgacatctgcaggattgaggattataaggtccatcctggtgcccagacagcctgcatcacacaaggactgtgaaatccctgtatgccacctatctgggtccatgctgatcctggcgtgtgaatagtaagacagccaccagcctggcagtcctaagacctggcagttgcagccctagttccaaactgacttggattccagctccctcatgggccaagtggggtgaataacatctgcccccttgctgcagatatgttatagtgataaaatgatcggaatattcgggaaaatgcttgctaaaaaccccaaagttttagggagatacaagttttgtattattctaagtgtagattttccctgtaataagtaaaacagactgtcagacgtgactgtgcccatgagggtgtgatttaagcctcgtcatgccacgctatgaccaggcactcagatggtattttgctagacctaggtatacacatattccaacttctaaagcccagacatgtaaattctacttcatgtgaaatgttccatgtgtcagctataaaattgccattcagatatgtaaatgatgcttggttgtaaaataagctggtgctaatgggagaacagcaggtccctaactgggctgccctgagctctctccgaagtttatggctagacatctgccaccttaatcatctcacaacgcaaagtgcttacaatctactcggaggtatatttacatgaaaattctggaacatacccttctgtgagccagagatggcctataatggaagcgaaaatacaataaaccagcagcagggcagatctccctggactgctcagcacttcaagtgctgtgcaggtggtgggtgtaaacacttagcttccgggcaccaggatgtggccaaggtctgtccacctggggacacccagctttctcacgcctgacctgcctgctggctggcaggggtgtagcacccatgtactcagggacagcacgcgcccggcttcctggctgcctcacgtgtgctgcaggctggccctgctcctcccgctgcccctgtcccctgtggcccagctttgctcatcagtgtatcagtgttgctgtgttcaccttgcaccagtcaggaaaggggcaggtctacgctgaagtttctagttagcatttgacattggggtatctgtgcaacacaggctttcagggggccccttcttggcatgcaattaaactttcaaaatcacctaggcagacactcccatagtgtgctttcagtcagtgacctttttcctggtcagctgtggcctgagaccagatatattcctcagccatggcaatgccagttccctaccccaggccagcagaacaccaccttcagaaatctcagtgtctccttgctgggccttggaacagaggggatgctcaaggccaccttcacatttattccatctttcaacacacattcactgggcatctatcacttacaggctctgggctaggctgtggggaggcacaaagataaaaaaggactgggtgtccttaacctctggtgtaaatacatgacagtgggactgttggttctgacaccccactcccctccacatgtagttcccctggggagcagtgcacatcacatccttggtggccttgtcccctgagctgaggggtcagctgtcagctgggtgtgaacacctttggttcatcattggctggttgtagctgccataagtcatcattgtttgcaatgtttaacctgccatgctctcttccccaaactctgttgatctttcttttctgttgcctaattgattttcatgttggttttatttttagaaaattgtagcggcaagtatatataagcatatatacggtgaagtccttaaagcaaagcacttctaaagaatgtgtgcttgtttttggcctctccacctttggttttcactgcgctccacaggacgtgctaaggattggttgcaatcatctaaattgttccccatcccatagattgtcatctccagcctggggccatcttggtcagtcacacttggctctgtgacttgccaacatagtcttccagaatgaatgatctggctgagaaatgattgaattcagcctgcgtttgtattctttgcaaaaacgttttgggtagtcctttgcatggtcctgcctgcgcacgcaccagcctgcttcatcctactgtccccctcccatgtccccacaccccgctcagttcctggtttggcagcactcatggacttatctccatcacatttggtcctaacctcaccaggctgctaaaatgacacactgtgactgctgggctccctcttgctccgtccctctttgatgcctgtttgttccttgaatgatgaaatgacccagcaacatactgtccctaacccatggatggctgtcactgacatttgtctcttctcattatcattagtgtctgggaggcaaaacacttgtttagaagctgtatctgccttattattacttactttgaaggagcaggtaaaaagtcattagggagctcactctcagagatccaggaatggtccctgccttttaaggtatgctgtttggaccaggtggctgacagtctcactcatcttctttttctgaccccacagtaaggttgtgtagtcccccatttcatatgtgaaccctttcccaggagccagctcagctgggcactgggttgtggacacagacccagcaaccccaaataaagaagccctcctcccagaggtgttacctgtgagctcagaaatagtcagagggaagactggcttctccgcaatgcctcgggttacctggcccagctgttctgggatgctggtttgcttcctatctgaattagaaagctgcatcctctcagctcttccaagcacagatagaaattaaaacagaaaatgaaatggactgatttcattgatttcacttgggaacctcagggtctttttgacttccacggttgcagggggctgccccagagcctatgtggtaagagcctgcttgagagccctgtgggaagaggctcgagggaacatcagcagagccccaggaatctaaggagctttctggaccctgacatgtagtccggcctcctgaggctaaggggctgtctcctgtagggttcccagctgaagaatgtgacatcttagggtgggaaggaactgccaagtttgtcttgtccaagccctgaggtgacactggaattccgcttattgaaaactgattagtagccccttgtggccatgtttggaaagctacctagtgaagagtccttccccagtctggtgtcctctaggggtgtccagcatagcgtagcccacttgcgttccagctccaccagttcccttcatgttgaaacctcctccatcccttgtaggggagatggggatggagtctaatcgctctctcttcatccgtgtactgttccctcgtcaacccagaaagaacccactgttcagccacagcagcctgagtgggcttttctagtgaccccactctgtatggccgctcgagatctaaagggcattagctggtataggccacctgttaactactcgggccagctttaccctggcccaggactggagttctcagctctggcagcatatttgaatcaccaaggagcttttaaaattcccaacatggaggtctggcgcagtggctcatgcctgtaatcccagcactttgggaggccgagataggcagatcacctgaggtcaggagttggagaccagtctggccaacatggtgaaacctcatctctactgaaaatacaaaaaattcggcaggcatggtggcgggcgcctgttatcccagctactcaggaggctgaggcagaagaattgctgatatcctgtaggcagaggttgcagtgagccaagatcatgccactgcactccagcctgggtgacagagggagactctatctcaaaaaaaaaaaaaaaacaacaaaataaaattcccaacatgcagatacgccccagatccattaagtaagaatccctggggtgggacctgggcttcagagattttgttaaagatccccaggtggttttagtgttcaggctagtatgagagctggcctccccttttcattgggctgacatttgtcatttgggaaaagccatcctcagggttctttaaatttgtaagatattttggcaacttgcactgtccccccggggctgccagtcacatcctcccctgaagcagccccccatgcccagtggtgtgtggtgggaggggaggtgtcgcaggcgcactgagggtgcatgaagcctggtgtgctgtttgctctttccttcctccctccctcgcatgttgtgctgccctctccctttacaaatgctgtctcctcttcccttttgttcttttaaacagaatattcatggtttgaagttcatagtccataggttgtcagtttcaaagatatcagttgaagagatgtacacttcgaaattcagttcggttgctgactttcacaaactctaaggaagggggccgtggatggcgtatcagacttgaagcagaatagggagaggcccgcaggagggtcttaggccagactgtggccaggagtgtcttccctgaccaacaggccccttactgtcttgcaggtctgatacataagttgtgcacatttcagaaggataactgtagagccgtctctctcgtgcacactgcctggtcccctgaacacaggcaagcagaggtgcacatgcgggcacacttagcatgcacactcacaccccacactccagccagagagggaagagtggaaccttcctgtgcacagccttagtgagaatgatgtggaaaatgatgagaactttaaaaaattagttccttcatttgttaaggtcttaagttgaaaaacattgtctgtccctttaaggagctgatatttcttttgagacgaactaatagaagagggaaataaaaatagcaatcctgggtttttgataaacctgtggcagagttcccattctgagcatcccaggagaagcaaggaccccttttaaactctgtcagaacctgttcctcttgggttcattgtcacattactgaatttcagtttttctgtgatatgctgaaaccccttattttctgtgaactttgtagaatttccctttggtctcaggaggtagcccttgatgctagagaggcttcagaactgagctctacctttccccagatccccagggaggaggccctcgagaagtgagcacatccagacgtgcacacatgtcccttaactttgcagacacactgtacagaaagcgtccttgaagcccctaaccggaagagcctcatttctctctgtcggctcctggtgacaccactgaggggaaaagagaggctggcacatgctggctctggttccgctgactgttgctgtttaatgtaaagatgcctcctggtgctggctggagtttgcttccaactcctctgtgttctctcagacactttctgaacactcaggtagtgctaggcaccatgctgggcacggagtggagtgaggcaaggcccctgccctccctggggtgggggttggggggcaggtaagcaccagtcattacagattctgcatcctggggccgagggacaggagcacagccagaccctggaggaggtggagctgctgaaccacaggggagctggtcctccactgtttcttccaaagactcatacggacctgcactccctcttatgtgaaagctgtctgagctgtggggcaggcagcgagggtttctgtagggaagcctgcctctctcctcctcgccctgactcagtctgtccagcttttcagcagccctgcctaagaggctgttgtcagacatacaccacccaggcgtttagtctcataggaacagagtgtggtccaagggggtttgtggcccgcaggcaggcaccactgcttgcccctctgctagagacattctgttcctcggggctaggaggcctgctgcagagcggttagttcctgagacccacagccctgactaagccaagagaactagcctcctcgcgagaagcgggggcacactctgcatctgttgaggtcttgcagcactgcctttactggatgcctgtcagcctgggcacagcatgtccccagatgtgaattagaaagtggtactgtgtccatgcccatgtccatggctgcctgccctcaagtccacctccaaggagagccactggtattttctcagggagggagcaggtgtggtgtctaaagatgggaaccacacatttttttaaagggggaaatgctctctggaaccattgactccttcctggttcattaatccattttcaatctttgatttcttaaagccaactgaaagtgaaaatgtccctgtcccaactgctacacctggggtaagatcagtgactagtccccaggggctgggccttttccttaagtttatttgaccatgtcgagttttccactggtttttctgtattctccatgattgtccttccagaacagtgtctgcagtggtttgcattcatcatcagtgtccagtactcttgaccagcccagcgttctcctctaacacagtagaatacgtggacatgcatgtgctgtgtggacgcagttttccgagctctgtgttgttagcatgtaactcttcctttcatatcatgctttttaagatgaaaaggccctagaatcacatcttcagttcttacctctgtcacctttgcatctgttgctgtttttctgaaagtgttgcatgttctactttccattgggtttgacctctccatgataacccttcagaactctgaagagagcaatagaatctccatcacctttttccgtcttttccgagtgatgcgattggtgaagcttctcagcaggggggaaggcatccggacattgctgtggacttttattaagtcctttcaggtaagagccatgccaaggacttctctctttgtctttgaagatcatatgtaagtcagtgattgtccccatcctagaggacccaggctccccctgtgtggccactctgtggacctaaatcaatagaaaacatggaatgctggagagacccaaatcagcatttcttgggtcaatcacatgggattacttgcctaaaggaaacagaagagaaagcaggaaggatccgtagctgagagatctgtagcatttccaagactgagagaggtgtggggcctgcagccctgcagtgcccccgggatgcctggtggtggtggtgagtgccaggtcccagcagactgcctggaagcccaacagcctctctctgacaccttttcctcataaggctacaacagtgctgtgtctgttggctagtctagatacaaatcagaaaccaccacctgggccagtgcactatcactgggttatcctgcacctggaagggtcacagagttcgggatgtttgggcatacaccatgtctcatttgtcacctctgattctccaggctggcacagctcggttctagactttcccaagtagaaccagcttttcccgtacctgccagtaccctgccccagacattctagccttctggactgattccatttggaagagaaggtgtgggaaatatagattcttagtaaaaggtggacccatgtagggaatttgtggatatctacaagcattagaaagtgaatcctgcatcttcattttttaaattatttgactatttttcattcaaaagttataaatgtttacaataacaaatgaagctgtccaaaggtatataaagagaaatttcaaacttggccctcacccacccctggggtaaccagtgttaccctcccagtaagcatttgtccctagtagatgggattttcacaggtaaaagggagaagggacagcaagcggggtggtgcaggcactcacaagggaagtcacagatcctgctggggagaatgaggttggaggaaggtaaagtgggggcctcaggcaggtgagccttgaacttgctaaggcacagaatcctcgacagttattattcatttaaagtaccaaaacttgggaacaaactgctataaaaatagataattcagaggtaatgttatctcactttttaaagaaattcttaaagattcaatttgccacagataagaaagtcatgttccagagcagcagttcataaaagcagagaaactgtgcaaacaaaaatcgtaaacatttggcaatctaggaagaaaatgcacgtaggtatgttgaggaaagcctgaaacgaactctgtgggaccctgctgagcagtccagctgcagggagggccaggctggcaggcacaggtcaacagctggcacaggtctgaaggtggctgagcacctgtgagccactgactttctgacaagctctctcggatagtagagaaagcgggtgctttaagcatgtgttcccagaattaagcctaacactctgggcaccctgtgcaggtagacgtgttggtcacatgtgatgaggtaagacagcagttgacattcagtgaaaggacgggggatctgtcagacactcgtacttgtatttggtgtttatgaagggagccacacttggcgaccccccagctcactccttttcttccctggcccagccccccaacttagcagttctttcagaaggtgtacatcttaagagaggtattttgcatcctacagccacagccagaaagtggttcttcccctctgacccagtaattccactcctaagacttcaccttaaggaaatacttcagcagaagcaaggtggttttgcataaagatattcctttgcgacattatctacaataccgccccccaaaacatacccacaaaagaaagtggaagtactctaaatgtccagtgttctggaatggtttgatcaattataatttcaccccaaaaatccagtaatgaatttaaggattatgagagttacgtgtctgtgttgaaaatgtttagggttaggctacagggttaatgaccgtggaaagcacatcctgcctgtaatattgtaacactgggcgtgcatgtggatggtgtcttcaggactaaagtagttgggcagggctgggatttaaacggttcttcctcactgtcgatattctttcacggtaacacgtggaatagaaaggaagcatgtggccactcatgggtcttctcaggctgtggcgggccgtcacggggacagccggctggtgctgagccaagtgccttttctctcccaggcgctcccgtatgtggccctcctcatagccatgctgttcttcatctatgcggtcattggcatgcaggtaagctccagccatctcgccctcaggggccctttcactgggtagccccaaatctgtggcaagatgtaccctgaccaagtgaagtagaagcattgtgatttttcagccaaatgcctctgctgaagcctaggaagatgagaaagacaaagctgcttagtagagagctccaggggaggcccaggctcagatgaatgtggagaggttagaatgcaccaggaaaaactgcatgtcatggcagaagaattatgctttatcataacaaagtgaaattcacttgaaactaactatttccagatgccaagactgaagagagaagcaagtagcccctcgtgggtcttttcagtctgtgccgagccgtcgcgggaacagaaggctggtgctgagccaagtgccttttgtgaccattgttgtgctttagtagctcacctttaaaaagaggcatgaaactgggctcttctgtgacccaagcagaggggctgcaccctgtttcccagttcctcctgggcatgggaaagggactgggcctgcctaacagaggagccctaacatcaagtgggcagtgggatgggttgtgggtggagggaggcagcctagtctaagaatggaggcagtcgaagagcccaggtggctgtagatctctgctggcaggctccttgcagattctccacgtgtgcaggtgctgtctttcaggtaaaggagggatgtaagtcagaaagaagtaaagtgattctatgatttttggggcagagaaatggtagtgcttttttcttttttcttttttttttttaaaatcctgaaagcatagaagcatttgcagatctctgggaatcttaccaggagttatgaaacaaaagtcagcatacttgagcctctgtgattcagcagcacgtggtgctatgtgccctggaaggtcttttatcacatatgttctcataaaaaaaagccatctcagaactgcaagctgcatggcacacacaaccccagattcacccagcaggcgtttgtaagcatctgcaggtttctctagaatgtcagtctgctccctaaatctcacaagtaaaactctttagtaccttcccattgccctgaagataaagcccactcttctgcccggggctcacagcccctgcctgttgcctcctgcccttgtctccagcctggtcttttatctgtctgctcatcacacgttattttcattccctcggtatctatgctgtcaccctgctcctatgcacatggtgctccctccacccgaaacactcttcgcctttcctatcacctgatgtatctttcagttctgagtttacatgtcacttccccctagaggccttccctgacccagccccccagccttcagtagatgagcctgtctcacgcttccctgtgtgtctggaccaccccagcatcatcactggggtttgatgttgcctggctacctttgtgtctcccccaggggagatccgcgaatgtgagaccgtgcccctctggagcaccacgttcccagtgtgtaacctgctgcctggcacatggttgtgcctggcagatcttttttgaatgagtgaagtgccaggtaccatgagaaaaccctagctggtaaagatcaaacctgagttagttctaaattcacatacggattttttttgcatgacgaaatctattctctttttcctgacaacttctccacctagatgtttgggaaagttgccatgagagataacaaccagatcaataggaacaataacttccagacgtttccccaggcggtgctgctgctcttcaggtgactgcaactggcttgggcggtgctcctgggcaggggggtccgctaggcgtgggtccagagggacggaggacacaggttattaaagcagtgtgcctttctcagttgattgtgatggctttttgtttttgtttgttctgtattcttaaacacagaccctagcatttcaaacacaggaattttgctggattgttaaaactgctgtggtaatcccgattgtggctggcataaggtttattcatttgggagttagtagggctacttaggccacctgaaaaattgtaggatgtacgtttatgcatggaggcatgcacttgaacacgaccaggaagacagaaacttagcaaaaacgtcaaggccttttgcacagccagtggggaacatcctaagatgtatgatttcaaattttttgggattgcttttaacgtcagttaattaactttgtaaaacaagctgccctcatagtgagaaaactttctagagatcatgaagtatttctaatgactctagtgactgacaagtcatttgcaagttaggtggtttccagctctgccttcaacaaaattgaacagagacttaagttgttaagtattttggtcattaaaaataatcaataggccaggtgcagtggctcacgcctgtaatcccagcactttgggaagctgaggtgggtggatcgcttgagcccaggagttcgagaccagcccaggcaacatggcaaaaccttgactctactaaaaatacaaaaattagccaggtgtggtggcaactgcctgtagtcctagctactggggaggctgagcccaggaggtcgaggctgcagtgagccaagatcacaccactgcactccagcctgggcaacagagcaaaaccttgtctcaaataataataataattaattactgttaattatacaaatgtttaaagtagagaagacacaaaaacaagcatccatttatatgcagacagttagcgcgcttgcatcagatgatggctgtaaatccaagggaattgcagcaggacctccagttactgtgataagttgcacgtgaaaatcagtaggaatttcacatttccattaattcaaattggattttcttcaaatgacttaggttttgctctaattatgagtttttctcccctaagatctaagcttcaaattccttctttcccccactaaagcccctttgttcttcatctgaaaaaggtgtgcaacaggtgaggcctggcaggagatcatgctggcctgtctcccagggaagctctgtgaccctgagtcagattacaaccccggggaggagtatacatgtgggagcaactttgccattgtctatttcatcagtttttacatgctctgtgcatttctggtaagtgagcaacacagctccccctctcaatttacagatgcttatgtagcagtcagcgttcacacaaatggccttgccctgtcccatcgcctgaggacaattgatgtggatgagcactctggactccacttggcagttgagggcttttgtttaaccaggcgtgtgtcactgccgccacctttgtaagcagagatttggtgctcactaatcggcttggagcaattaccaatcaccttagcttcttagggttcctttctaaaatttcaaagccagtgcatatggtggtgacctaagagtgtgaattatttggtgataatgaaattataaaactgcaatgtgtttcagaaggccttccttccccaggacttaattaaagccattccagaaagctagaatcacactcttttcttaaacattctccaaatagaaagtttttacaacttctcttggagacatgggttcccatgtttcatgtccatgtcattagaaagcctgtgctcagttctaacgcaatccagctgcagctgaagttcttcctttcctatttgctttttcagatcatcaatctgtttgtggctgtcatcatggataatttcgactatctgacccgggactggtctattttggggcctcaccatttagatgaattcaaaagaatatggtcagaatatgaccctgaggcaaagtaggttgaaaaatatttgatttggcgtgtgtgggtggattttggaatgtcagctttttttgtggagtggactgaaagttcgggccagctggtactgttcctggaccttagattgtattttacttccaggggaaggataaaacaccttgatgtggtcactctgcttcgacgcatccagcctcccctggggtttgggaagttatgtccacacagggtagcgtgcaaggtgagtgtcctgtgtgcgtgtctgacagcctgtcttgtagaagcttgcttcatttaacaaacacttgttaagtgacacagccaggccttctgtcagttgctagggatgcagcaatgaataatatgtggttcctacctctggggaaatctcagatttgtaactctttggacaccctctcaggaaccatcagaagaggaagggaattctgtaatttgtcattgggtggatggtagagaaggcgacatttcagtccggtccagaaggaacacaggagtttgtcagaggcagggagggctcagaaggaggcaggagaatggacatcgtaatggcaaagggtgagccattgggtcatcctttggctaggacataagaggaagtcagaaggccccaggtacaagctgagccttctctgtcctgctgaggtccaggagaatggggaggaaacgtgaatttcaggttcccatgttaggaagttggctgttggcaatggagaagtagacctgaggcagggggatcaaccaggagagccagaacgaaggcagcagaagtgggaagagataggagcagtcgcttggagatccacttaggatgtggagtggggaggacttggtggcctgggtgaggggagggggagtgctaggagagcacatctcccagcctcggcattgggggacatggtgctctgtgttccacacgtcccctctgctacagagctttgtggccaccacaggaaatggggcccctttgctggcacactaggctctagtctctcagggatggatgcagatctcccagtgcaacgcagttctgtgtttccatgccagagcacgctctcaggaaccctcagtgagacttttccttccacagaactcacggtgtagcaccttacatttgttgcagcgacaaaaaagattttcctttttcaaggaaaacgcaaggtttgcctcttgaaactctgccttctagaaattcatacagtctgcatagcaactagttcttgctcctcatggatccaaggagatcctggggtcaggcgtttttaccactccaggatgctgagccagctctagacagaaaccaaggtagcagaacagagtctaaaatatgtttcagactctcaaagaaatcccttgagccagactcatgttccctgccctgaaaatccagaaagccttctaggcaaggccttagggtccttgcctctcttcaggccggactctggatattgaaacagagcttgacttttttttttccataaacttcccagtactggcctcttttctgctttccaagaacagtgtgggatcccgttcactgatgtcttcttgtgtttaaatttccagacccttttacataaagctttcaaatgtccttgaggcacagtcatccattttgctgactcaggaacttaccaggaaaagtgaacaaatgtccagggttccctggctgcctgtgctggttttgaagagggtgccggggttggtaggaggactaggaatttgggtgggatggacttatgcagacacaagattccaaatcatcaatatggaagagaaagaaaatcttttcttttggaacatgctgttaatgaaaaataagaagtttttaaatattatcaacatcaccattaatttagtgcttgccatttgcctcacacaaaactctttgtgtccgtgagtcctttaatccttgcaagttcccatccattgggcatgtcatctgcatttacaggttgaagtgactggggtccagagagggtgtacctcacccaaaccccctccaactctcattgctggtgttaaagggatcaggatatagaagaggagtggggagcatggatcctgctctgaaagaccaaagcctgggagaagccacataggctcatgcaaaatgccacaagatgtacatgatggtctaactaggcaaggtctgaaggacattccctgagttgggaatagtaatggatcccgtcggttgagaacctaagtcccaggccctgtgcctggcccattgtcttttacttcctttaaccctcacaacagctttaaaaacatgcttggagccgggcacggtggctcacacctgtaatcccaacattttgggaggccaaagcaggaggatcccttgaggccagaagttcaagaccaacctgggcaacaaagcgagacctcatctctaaaaaaacataacaaaacaaaaacaatgtgcctggaatggaggtctgaccctaagatctccattgagattagtgaaaaaaaggagaagactgtttgaacagtgaagtttcacggtttaaaaaacaaaacatcatctgcgtgttaacatttatatttcatgactaaacctttgatctttgtcatcccagagtcccctaagtggtaggttgtattaatcagggttctccagagaaacagagccaataggatggatatggaggtgtatatgtatgtatgtgtgtgtgtgtgtgtgtatttgtgtgtatatatgtgtatatgtatatacacacacacagaggtttatcatggggaattggctcacgtgatcatggaggctgggaagccccatggtctgccatctgcaagctggacctggtgttggtgtccactctgagtaaagtcctgagaaccaggggagcccatggtgtaagcctcagtcaaagggcaggagacaattgatgtcccagcttaatcaggcctatagagagagaattaaatcttcccccacctttttgttctctgtgggccctcatcaacagaatgaggcccacccacattggggagggcattgctttactcactctacccactctaccaattcacatgctaatctcatctggaaaaaccctcgcagacacacccagaaatcatgtttaaccaaattggcatctcgtggcccagtcaacttgacacctaaattaaccatcatatgcgtacccccaaatggctgttgaatggaattgagggttgactagaaaagagatgagtgataaacggaaaataaacatccaaaaggatatggtcgtggtcactcatttgcattctacaaagaaaccttcctttctgtttacagagattagttgccatgaacatgcctctcaacagtgacgggacagtcatgtttaatgcaaccctgtttgctttggttcgaacggctcttaagatcaagaccgaaggtgagcattccctgccagcaagacaagatggcaggaaaggagagagacatcacatcccatcttgccttcctcatctgggccttttcttggccaaggggaggccctggggaaggggctggcaagtagaatgaagatgtccatgctgggcttgccggctggcccctgcctcctgtttcctcatcctttatctccttcctttatgcttcactttgtcccagaatgttttgagttgactcatactactgcttactacatagcaagggaaacaggcagggtatcggagcagagacgaagccatcacaaatgaactcactccaaccatccctaactagttgtatgacctgcagtgagggatttcactggtctgagctgtagtttctttccctatgaaaaggaaatacggggatgtctaggaggtcctgaggatgaaatgaggtgatgtctgcaaaagctcctttgcagtgcctagcacacagtcagcacttgagaaatatagtgggatcagcatcttcccagctgagagaccaaaccagaatggccttcacagccatgctcagccctggtcaaatcctggtaaaacaggcactagagtgtggccattggagctggctcagtggtgacttcagaggtggaatggagagcagattgcaacaggctgaggagtgaccaggaggtggggggaggtgggaggtggagacctcaaggagagctgactctctgaggcactggtggaggagagggaagaggaggcagcaagggactcatgctgagtgcaggcaggtgacttcttacaaccctagagcccagggagacttgatccagcaaagccagcctcttccagcctaactaacaggggcgccttgtagcatgcttgtctgtacctggccccaggccagcattgttaagggctccagaaggcagaatggtcctctatactgacatgttagttgaaaagacaagtgtcagctcatataataaaaggccaaggttatgttgtatggatgagtacatatagtaggaattgagagtcttatttgggtgaaatttaggctggatcttcaaggaaggaggtacgatttggaacaacccatgaaagagcagaaggcaaagacattctgggttgggaacaatggaaagcaagtagtaggtctcagctgtgggagggcaggatggaatcagagtgggacaggccttgaatcccagggtgaaccgtgtttgttcccatggtggagggacttcccactgggaaggcatgatcgctattgctgaatataggaagtgtgtttgcccctgactggggagagcctggtgggagtggagccccatcagagggcagcatgttcatccaggtcaggctgggacaaggctgtgcaagcagaggaggagctggggaacagaaatgaggcttgcttttccccttttgttttttgaatccagggaacctggagcaagctaatgaagaacttcgggctgtgataaagaaaatttggaagaaaaccagcatgaaattacttgaccaagttgtccctccagctggtggtcagtgcagtctatttcctaagtagtccttggccagtgctttggttttaatgctagtgtctccagaaagtccagagagtgtttgcaaaatgctttatgtatcatttagagcattaaggccaactgataaagaaagccctttggccatttggtgtgattattttgggggtgatatgaagaacattccagacaaaggagaggcttcagtgaaaaaccaaaactcacatggctggagcagggattttctttttggtggaggaattaatgtttgaggacaagattgtgatctcaaagtgaaaagcctatattttttgtccaaaatgaaatattcaaaactagtttccaattacccttcagtatattgttgaaaatgtcccatgaaaaatagacagctttcaggaaattgtatttttgaaatgttcttatcaagactgaatttactaccgtaattaccaaaaatgtccttttaactaacaggcatgcttatttccttttgttatttatcacaaaataactaaccttctttaaatttttatatatataaaaaacatctatatatatacacacatacagtgtgtgtgtgtgtgtgtgtgtgtgtatatatatatatatatatatatatatatgcatactggctttgcatttttatttaagtacatgtggacttagacgttgagatggttgtttttgactgttctgtttccaagttttaaaggtgcaggatctgttcacccagtgccaccacaccagcattctagcatccttgggccgggcacgtgatgagcctttggtgtgtttcgtgaccagcgaacttttatagcgtcgctgccgccacggctttcgagactggtctggctcaggtctggtagctgacttcaggacccaggccaggacggtgaccgaggccctgcccctgagaaggtgatgagctctggctcttggggcgcagacagagcagcatgccagccagctctgctccttagcatgaagcgagaagcaacgtgagcttttgttgctgaaggggttacccgtagctggcacagccacaggctcaaagctggggaagatggcccagaaagaaatgataaaaggaagacaaaccaacaacaacaacaaaacaaaacaaaagtcctcccacctggagggccctggcttcccacaggagaaccgatactgcacatttaaaacaactccttggttttcattcttttctttttagctgcacacctaagagcttgcatggcttacatgaaatgctttggaaaaattgtaacaatgtgcttgagcttttcctgcagcctccattcctttcacctctcagtctttcagaatattctgaagcaattctgttttagggtggtggcatggaatcagagttatctcttgccaactgtattcccctacgttgtttctttaaatacagatgcatgcttcagaatagtgggctatgtctgtctatgtaaaccttccccctgcgagctgaggaccccgctcctccctcgctccacctcacatctctcttggaacgccaccttcatcacaaccagccagactcccacattgatgcccatcctcgtgaaatgccctcggagggtgtcatttgcattagtgtgaaacttcatttcttttcattttaccaaaagaaaagtccagaatttagctcgccatcgaagctcccttcctttgaaaagctgatcaacttttagctttatcagacttctagtagagtagaaatcttcttctttcttggtccaataactggacctcgccttttctctctatttcttaaaatggattggagtttaggatgacaggttttaatctattccacaacggcagcgagaggcagtgtgaggcacaagaagagagaagtggggccttaggagggatgcaaggctttgcaagctccctgcctgtgttgagtgatgtgcccagtgcagggcttatccgggctgaatctcatgtgagtgctgtggccacgaaggaagttccgaaggcagtggccatcaggctttggtgcatagactctggaagagttgccggacagggcttggttctccacattcatcatttgtctgtctttcctcttttatccttcagtaggcccatgtccccaacctttcctgcatcacagcatacttagaaaaggatatttgcatacccctctgggaacagatgtggagttcttgaggctgagggcctcagcatcccctacaccatcacctggtcaagaagcaggagactgagtaaggccagcctccactccaagtggctgggactggcagatgtggggtgctcaggaagccccttttagccctggtgatagaactgagtcagatgcttgtcttgggtggcttcgctagtgtgctgtgaggtgtggcctggctcctcatgagcctgatgatgagatcaggaatgagctgtggatctgtggatacatgtcaggcttgcttcactcccagtggcccgggggtctccgctgccccctcaccatcagtgctgagccgcctcatctctgcctctcagctcaggttctcacctctgctcttcagccttcccgtgccatcttgtgggtcctttcccttcatttcagaagctctctctcctccccaggactctcctccatccatgacctggatcctttgctcctttgccctgaagagcacactgagctgcctccattgccttcttttcagtccggagcccagatggcctccttgtattcattccttctcttccttcctgttctgtcctgctgtagctttgacttttcttgttcttaggaactcttccttgggcccagtctcctaattagcacagtgtctcaatggagaagacgaagtgacccttgagttctctcctgcagagctctgggtgggtctgcctctactctggaggctgaagggagatcagagttaggcctgtatttgctagaagcatcagggtggaatggggtgtgggtcttcttcaggtagagccagggcgttttctgggccccacagagaagacacagagccctggaatatagaggaaggctgtggcatggcaggccaccagagactctccctggggtccctggagtcattagccagacaacagcgtgtccactttttgtgtgcagcctgggaaagggatacacttgcatggtgtgagaggcagctctgaagaagcccagcagccagtgtggctggagacggccatctctggagaggtggtatgaaggataggatcccagactcaaggagcacactgtcctgtggtaaggtcccggcttgactgagctgggcaagtcatttagccctctccatctgttggagggggtggtggtgagcagatccaccatgtcagagttgtgaagaggccatgagacccacatggaattcttctgacacagggcttggcatctatagatgtccaacagtaggggctggctagagccagagctgatattccaaacataccctgagcaaatggggaggctggagagtacagcgaggggtgaaataccaggacctgagtggtctctgctcacctcctgccttcttgcctatggaccttgcatcattagacaagccgagacagattaggaaccatgttttacatgctactcagagtctttggcttatacctgggtggcccctacaccactccaggactatcttagcttaggtttagaaggaacagaacacttctccaggccagaccacctgagacagccttctcacacagtaacactgagtggcttctgacagggaggcctggagaggcagcccaaggaggcccgggcatctccagtggggaccacaagatgttggcagcacctcctggatgggcactaagtgaagcccaccccgggtacattagtgaaggatgatggttctccatgtcccccagcccatcaagcttcaggatccatgtcaatggatgccaccgtcagcacattttaaaataagggtgactctgagggctcatgatcaacatcaagtgcccagcacttaagacagcctgagccaggtggctgagtgctttacctgcttcctcccacatcatcctcacggctcctctgagaggcttatccccactttacagatgagaatacaagctcagagaggttgagccccttgcccccacatcagcatgtagatcttgcaagggtggcctggcctaaaagccagctgctctgtagcctttggaccagcaaccattcctccttccagcctctgcaagttgtggtcagtggcccccagggccccacatggccccacacacatgggacggagtactaaagtggtcacaagctttacccccaagagacacagcacactgaagatttggtagcaagcagccgtgggagagccatggggcacatttacacgtccaaagtggtttaccatgagacagccagagcctctattctgcctcatgcatcacctttaaagtcatcagcagagttctgattccccaaccatacacgttggaggttgtttctgaacaaagcaaaaataagcccagctcaactatgaggttggttggagctgtcactacagtgcagaaaatgagctgttcagaattacaaaccaagaaatggtatatggagcttattggtggagaatagggggcggggagctcatgaaaatctgaatttgcagtcacttttctaaaccttcctctccttctgagcatgtatgtcacctttctaggtctctatcttgagacatcgggatttggacggttaattgcccttgataagtttatggtagttatacatgcaaatccctatgcacaggggtgaaatgtggcccgtgaagcctctttttgttttgtaatttttattttaagtaaataaccaagacagcatttcatagtgttactaatatgctgctctattaaactcataacaaatatattattttctgcaacctagagtatcagttcatttaactgacactaattttgagccttagttgctttgcaaaaccttgctttttgctggtttgagacccctgtgttatatgctgagacctcggtgccttctgcgccggaccgcccacccgccccactctgcccctgcccctgccccagccagaagcaagtgtttaggctcttggtctaatgtgctgattcgggagagctctgtctggtctctccgtttagatgatgaggtaaccgtggggaagttctatgccactttcctgatacaggactactttaggaaattcaagaaacggaaagaacaaggactggtgggaaagtaccctgcgaagaacaccacaattgccctacaggtgaattgttgtctcattttgttttctcttttgactaacgattttacaagcttatttgaaatactagagagctgcctattcatggttgagcagtaccacaaggattttgtttaaactgagatactacacactcccccaaatgtggactagccatttctgggccacaaggtaagtgcttccctccccgatgcctaccccatagagccctgcacctgccactacccacgcggcagggctgccaggacggagaggagcgagcgctaccctcgcaccccagcccctccaggcagcatcctccaagcaggcacccaccttccccacagccctgggctccagggttctggctgcccagtgaatgaacagctttccatctgaacgcaagtgctttgttttgtttccgtttgtttcttaccccactgcttgttggtttttggtccatttcagtaacatccatcacctcctagtatgtattctgtgtgtgtgtgtgtgtgtgtgtgtgtgtatgtatgtatgtgtggtgtgtctgtctctgtatgttgtctcctgatggccaggaggccagctgtgcacatgctatgctctcatgccccagccagcctctggtccctctccctcctccacctgggccctgctgcaggctcctagagtgtggatgtggctttcaggaacctctggtaccagccagggtccttgcatgcgaggaatgtagaaacctaggaaagcccaaagctctgggatgggaagcaggtatgtggaggggcaaggaaggcaccatgaggaccagcaggaagaggggctaggaaggtggtctgtgagtgccgtggatgaaggaggcagggcaaagagggagaagatgctaaggacagggaagagggaaccacagaggctggcaaatcatctgaaacaactgacctctgctgcccagagtgctcataatccatcatggataggataaagaattttttaaaatctatttacgccacaattttatgcccctgttctcagtacatgttaaatttggccttgtagatattgataaggttcaacatggaagagtccttcactcttatccagggaaaaatgcgcagcgttgtgtgttcaaagtgatggtaacagcccaaatgagggcttatctttgatcttgctgagagagagaatatgaatatgaatatgaatatgaatgacagtgaatgagtgaatgacaaacatgagctgtgtgtgtgtatctcgtgggttagtagatggccttgtgtaacagtgacctgctgattcatggtgcaacctctgctctacccagacagctacaggggctggggaaagaggcatatgcgggttggcaggtggaccatgaatccgactgaagacagtgatcttcctgcctctcatcacgtatcctaaaggtagctgagggaatcacaggctcagtcacacagcccattggcatctcaggtggtaggatttgcaaatgaagctttctcacttccaaccaatccagtttgtaaaagtgacagcccccctcctggattgcagttcacagctagcctccgaaagacaaagcaaactgcagagatatgtttgcagattagaagaagtctctggtccatccatccttgagggcagcgtggccaggttgggtgccaggagagggagtgatgaacatgcttctgcaggcttgtccttaaaggagtcccctgcccagaagatgaggctggttagatggtttagttccatttcccagtgccctctgcttgtagggaactgcttattgttctgggagcctaattgggaccagaacttgataacttttctggagggaggaacatagtctgtcatcgatggttgatgtcctaatttacagccagcaggttagctaggtaccatgagaatcttgcattttctgtgagaggcatggcggccacttggatgcagggtcatttatactttttctgaacccccaagacttcccaattagacaatttcagcactttctctagtggctggaaatagtgttttgatgttttaagatatgcacaaacaacacacagctaagtcattaccaggtttcacgtatggggtttactgagtcttaagttgaagggtcaaatggcatgaatgatacagcggcaggttgtgggttaaaagactctttttgtgttgcaataatgttgagggtttctcctaaacgtttttcattttattgtttatagagtttcattttattgatgaaatgcaaacatttccagttagatgataccaacatattttcgcatggctccattgggagctgaagcatcgtctgtaatttatgttgagaatgcagcctggaaaattaagttgtgttcataatcttaatagagaaactgaaaatgtacttgattctgaaacattaaacatagacattttttttgtctccttgaaggataattctaattgcattttggcttcctgtgctgtagaaatggctgtgagtgtgatttgttactccatgtttaattagcatgagtaggctttcgtttctgcgtgatgaaataccgggtgacgatgtagcagttaggaaaatttggtgggacggcagtgggagagatataccaccagtgtaactaggacaaggacacagcctcgggaagcccctgagagtgggcgtggcctgttgagatggaggatggcttgcctcctcccacagcagggtgccccatggctggcagactgcgtgctaatggaaagtggagcatggccgtcgcagtgtgagcgcagaagtgcggacctaggcatgtgcgtgcttgtgctgcgtagggtgcagtctgtctgaacagcttccaggatgggcccaagacctctgcgcccccacccccagggaatgttttttcaaggacacatatacgcactgtggttttgaaccctgtgggctccatctgatctccctgtgttcagaccaactgcaatgctgcctcccacatgaaggggaatggcttgagctcctggatccatgtgtgggaaggagctcggcatccggtgtcttctggcctctgtggtctgaatgagtgtgcagtttccatccttccatccatcttcatcattaaaaccaaccttctctccagcccctctacagagggaaccagagagaagctgcatcaggccttttttaatttcctcttgcgcatctcctacatgccatgttcactttgggttgactcagcatttgctcgtcatccattgttgctacatccgagtgacccacgagtttccacgaggggcaaataaataaaggaacacagccatgcagccatgaaaattctcagtcctcctcccagcagacagcaatgcatgctgaatgtcccatcagaccttctagatgaggacatctgtgcaagttacagacactcattagtccagtgtcttgtggataagaaaaagaccccaaagtgggaaaagttttgttcatttctctttcttttaacattcaagaatttcctttctgcaaaagacatgcactccggtggaatccgaggacactatgtcccccactcatcccagatgggagcctttccatctccattgtaggaaagctttggagggatagtccttttgcctgtttggaagtttggtttaaggaggagaccattatttctagctataaagaattaggttgttaggttgaataattgtaaagcctgtgcccgagccgccagttggcgatgcaggtggttgaggggagatgtgggtggtatataagaagcaaaggactctcagcccctgatgtgccccgcgtggtcttcttagggaggctcaatgcataaagacagaagaaaatgggatcctccacagagatttaatctgtagaagatcaaacacctgttgcctggtcaccttagtctaaaaagtagtggagttttgttttgttatttttttaaagcatgattctacctgaagccatcaaaagcctctttttaaatttttttctttttttaatctaagaggagaacagatgctaacagatgagatttcactggctgattcgtttgtttcagatgcttgaacggatgctttagaattttctgcctgagctacggcaccaagctggttagtcggaaggcgtttgtggctaaggccttgaaagggaaaagtctcaagtgggcttatttctactgaaacagcatttcagaagaaatgcaggaaaaagcagacccaaggccccagggagaccccttccaagcaaagcactcctccggaaggtggaagcggggccgtggctcatctgcggagccagggctgcctgtcgcggacgttgctcacggtggttctttttcgtgaaagggaacgtacaaagcttaacagttttcccttccaagcagagactcagagaaagggaaagagtgagagagagcaaaggaggggggcagctgccccacagagaaatgaaatgaacacaacttcctgatgctggccagtaaaacaaaaaattaaaaataaaaataaaaagattaagcagacctgcctaaggtgggtatctgactccattccaaagtcctgcatccctagtttgcccgaactcccaaagactgacaggcccctcggcgctgagctgacagagttccttttgtatgccagtccgccatgacctcctgagcgtccggccctgctctctgcagagacccagtccagaatacagtgagaagtggacaggccaggaagctcagatacacccattgaaactaacacatacacccgcatgccaaaaccaatccaggcaacacctcaggttccatcttaacgtgtccacaggaaacaccaccacacccaaacctcatctaacattgtccgtctttaattcgtgctcagagccagtctggggatgcctctttggaagcagtgtggtctagtttcaaggacactgggagtcagggaacctgggttctagtcccagtttcagcattcacttgctgcgtgaccttgggcaagacacttaacctctctgtgcctcagtttcccccatctgtaaaatggggttaataatgtcgacctacctcacagggctgttgtgaggaatagctaagtgattgtaaagcactttgaacgtataattgcttattaagactacaacaataataatatcatatgcctgtttactaccagaactttaagaaattcttgttttcctttgatctcttttctgttctgtaccatacttacccattgagaaggaaaattccccccttttaaagaaatctaggcaatgcacaaagatgtcaacagaggtaaccctgcaggttgcattttcacatcttaagaatagcagatttttgcccaagatgttggtcgataagggtgtctgatcttgaattctcagctgattccaagtggtggttggagtctgtacatctgatgctgagcccaagacacccaaagtggccagtttgggttttaagatcaacattcaaagtagccatagtgcagaggtaatgcagaagaatctaaaaaaattgaagtatctgaagtgtatagagaaaagaagggcttatgagcccctttcacctgccctgatgtgtacaggctggaagctgtgtgtgtgtgcgagtgcgtgtgtatgtatgtggggtgtgcggagacaggggaagagagagccagcaaactctggggggccctattcctgtagaagtggacacccttccaagcatcctgggagggcaggagtcccaaaggctaggcagagggtgggagcaatgtcaccagtgggaagtatgctttctgcaggcttgtcctaggtgtgactgacagggtcagtcccagcctcagggtcttttccagtggtgtcttttgtgcctatgacatttgcccttggctgcagtcctcactgtaccgagaggtctaacctacctggacttcagtggacctgctgtcctcattatggaaatgggcctagctcccgactctgcccccatgtgtataagtgtgcagactagttaacatccaggagctcacagtaggtgttgtgggttctcacagcacagtccacagggcccaagggcaggtttgactgcttcgtgctgcaccacatggtgatgtgggggatggggtagaaagccaggaacactccagtgtggccaggccacttgtcaagatgttgaagcacagctgcacctggtatcaaccgctgttaccctagcacctgagtctccttccccactgccagcagcccagcccctcctgagactgctctgtgacccagcagctacaggtctagtgcctggcattgcagggagcctccaggaccctgctgtgatccaaaggcccacttctgctctgattgggcagcacctgggtatattaagttataagaatttatgaagaatgtgatgtatcgtccctgaaagggaagcccgtcagtcctgtgggggtccgtcagtccctctgtctgtctttgacccacccgacgttgagttgattcagtgctgaaggatggcacgtgcctaccccctgtatgtgtcactctgtctcagagggccggtgtgaccgaccttctagatccaagattccatacactcaggcctcggcagaaaggccccaagcgattcaagtgggcggcgtttccatgtgccttctccacgctcctcaaataagtaaaaactgacaagtgaccactttctagatgggacttagggagtgatttaaatggaacaagagagtcttctccacttgggcctggctgtgttgctggggaatggcattggctaaggttggtagccaaggccagcttaggaaagacagccaggaatcaggaaagctgcttccagcttcaactcaaaagggaaagaaggcttcctgaaacttgatttgcagtcaaactgcagagacaccgctgtcgtttctcttaaagccttggcagagaagtgtagcttctagtgtagtcaaagttgtgagagacgactcaagttcattatttagaatcttcacagacacacacagcaaacttggcacccccaacaccagcatccataggctaaactcttcagctcctggatagaagatgagaggcaggccagtatacattgtagggaggctcttctcaaatagcttatactgtttaacaacccaattaaaaattaatccacaggactattgggtactacattctatactctttctgaaagtggggagatctcattcctttgagaataataattatgttcaggagtctttgagaagaaagactgcaaagaagttaagtgatgtgacgtagtagtaaaaggtggtaattatcgtggcttgttatttagtaccattcacctagtgtcctttggcagcccaattgtgtcatgattagatgatctgtgcgaaggagctggctaagacttactaacagttctagggtgggtagaaacccaggtgagttcattctccttggcacctcttagacctaagggacacagctgtttgagatcttggaagggcacataattctaaggcatggtgaaggcaacccattcagacgtcccaaaggctggctcagggaagccataggaaggccatttcttccaagagtggagaaaggtccacagaagagtgggaatcctagatggggtaaaaaagtctacacctgaggaaaaagtagtagtgcctgttggaggatagattgatcagcagttatcaaactttttggtcttcggacccttttatactctacattattgaagacccttgtgtgtcaatatttactgtcttagaaattaaaacggagcagtttttaaaacaagaacatgcaagcacaaagacgccagggtgatgacatcatgcatcaggcagcctttgaaaacctcactgtgctctcatgagaggatgagagtgttgaaggcaaagaacatccttatgttatgcaaatcacagtgacctcatggacccctgacagtgtcttgggatgccccaaggtccccagaacacacctgagaactgctttgggggaatgctactaggtccccctaaaggcagagggtgctggagccttttaatcatctcccttgttaaagaggctcctgtgcagtggcactgccctaactggagcccttctccccctccagccccttcccagtctcagcccactccccggaggcatggagctgcctgtgtccccattcgtctagcatggccgagtcttgcggcctgtgctgatctgcaggtgtgatggtctgaatcagggcaggatagaaagtgtttttaaaaatcagctcccctaagtgcacaactgggaccaaggatgtgtgccaaacaggatccgtttcagggataacttttgatcatttgtcatctccatgctgacttaggaatataagagctctgctagggtagtcaaaagagggttagccttgatcaggtggcaccccacagtcgtgactataggtgagtaagtgtgtgattcagactccaatccagcgttctttcccagtaggtgcagtgactttgcctgggtggtggttgaggtggggagtttgggagaggtaaggcagcccagtgtcacaggaagaacaggcttaggggccaagagtcctcactgagcctttgactcatttgggcacataatttaaccacatgggaataactttggctctcccttcctcccagaatctagtggaatatttgtatgtaagctcacaatgactggtataaagatgctatcagaacagaagttgtgttttacagcttctgctaagcctaaactttacagaatgctctattatcaggaaactggcaagactttttttgattcggttgttaaaattacaacgaatcagattcctgattgcaccaagaatcaaggtggaactgaaacggagagctctcagattgtgtgcaggcaaaggtcatattttagataatttctttaaagtttcctttatctttccaagtgatgggaatagcgcaacccctaggggagcttgtgggggtcatgttacccctgacttttcagtgagggttggaatcactgtggatgactaacagagcgccaggatcccaaccctttatatctgacacaaggaccattcacaatggacacaaaggctgccatcacattatccctggaggagagtggtgacaaaataaggggtgtgcccacgtgtgatgtgctgaggaggcggacggcagcttgcagatgagcaggtttattccataagaacttaatctcattctgttttctaatggaactagtctaaaaaggtcccctctcattgggtatagactgaatcctgctaaagggttaaccagaacttgtcaccagcgagacgactgtgtgcagggccagcctaggctgagtgcagcctgcctgtgatggggaacaggctctgccaggcagggttctttggctggagtctcaaagcctggcgcttgtatcctgaagatgaatggcctggcccagtcccgactagagacatgcatctcttatctccactgctacagcgtaggtccagggcggggctctgggcacttgtgcatgcttgctgtggcgctgtgagggctggcagatggctggtgtgtctgatggagctagcttagggacacaggcagcaaaagcattgcaaatgcatctaggcaggagaaacttaaccctaaaagtgggcaggagaaagaaaggtaaatgggtgttcatatttgatgtcaaaatgtcatcatattatgctattcagaagtgttttgagacattttagttttttttggtaacttaatcattcaatagaatatctatgaaattccaactaaatggtgtctaaaattttaagcagcagtctacaggcaaagcgccaacatttcttttctaaaaattatttatgataacatctagcattttaaaatcaaccagaaactaggcttgattctgtttaatattttataagattggacatcttaaaataagtcaataatgtttatattttatagcaactctgtgtttcttcaaaaccatatttctgctgtgatgttaatggaatgactttatatggctttaattgtgttggtttaagtgctaatgaccacttttcaaattaaaatagtattttgctgatagaggtagacacagatatgagatatgaaagaatagataattttactgtttgtaaagtgtttatcccaagaaaaaaaatgttcttttttttagggctgtggaaaagtaattttttcaagagtctaagatagttttctgtatttctggggattggaacttgtgcctatggaattttgggagcagcctaagctaccttttagcttgatatgtgtgctagaaaaacttcattaccatgttttgtgatatgtaataaattcagggtgctgtgcttaagcttcatgtcaattctagtttgggaacatctgtttccctcactcccagtcgtgggggacagcctgacctggccctacccagaacacatgtgaaaaagtagagtcagtccctgactcttatgaggtctgttttttcctgcctggaacaagcagaatataatcatgatttctgactctctgcttctgtgtctgggaagagcgattcttctctcctcctctaatgtctctttaataaatatgttgtcattatttgtctttggaagtggcaacttgggccacctttcaaccttctccatgatttatgttgcaaacaaattctctgtcccatgtctgttcattgcactatcttgtcgactaaatcctaatcttgtgtatcactgaagatgtgctggagacagtttttgtttctattatgcaattatgttatatgtgtatttcagtgaaatgtcaacccgtcaacagaggatgatgttaaaaattatccaaataaatagttttctatttcttttaatcagacctagtccaatcagttgaatgacagtaaataggattatatgttgtttaaacttgggagcatttctggcctttactgccttgtaatatggattaatgtaccaaatttacttgggggtgttgacttaagtgcattataacctatgtttattttgtggaagcagcagcaggtgtcttaaaccttgtctttttgtttgggagccttagatatgtaaccgagttttcttcccagttgatccaaaatcagaagtgaaccccttgcttagctcaccatcccttgatgatgtaccctaggaagctctgaatgaatgaaatgcggctgtttagtactgccgggtatgacctttcttcacgttcctgcagctgtgctgtgtaagagcttttaccaacatagcattacagttgccttcttgatgtttccatgagaatggcaggtgggtccacctcagaaccaaatgacttcccaggctcagatgtgctgaactcgtggatcctgagagagggaaagtgtgtgtatgtgtgcgtgtgtgtgtgtgtgtgtgcgtgtgtgtgcgtgtgtgtgtgcacgtgcacgcacgtgtatgcacaagcatacccacatgtgcatatgtgtacacacatgcatcctgagcctgtgatcagagggacaggagagcaagaagcagcctccctgaccaccccaagaactgtcttggtttgacccgggacatgactgtctgtcccctataagatctcagcattcctagtcaggaagcttaaagctttcattcccagctcttccttcaccttcagaattcactaaatggaaagatctgctgctctatcttcacagaatggttcaaaccaaacccaacctggcaccatttttagcagaattgtctcaaaggcttggtgcttttgtgcaccaggctatttttataagggcctcttgggaagttcctgtgtgactttacattctaaattatcatcaccagcactggcattggcaactgcaggagaccagttttgagcatccccagaccagtgggacccagccctgatggatctggccagactgcagccaccatcccctcctcctccctgaaccacttctgggcatctgttctaccccatgcttgtctcagggatggtcatcatgcctatctgtccttgccacagctgcccacatgctaagaggtgttgtggaggaaggacagggaagcggtctcctctccgaggacccaccacttagtccagttttcctttgcaaaccaccctgaggttgaagcatttgctgcacatccattgtcttagctgttctccaggcctttagggctacagagctgtggacagactgccagtgagtgaggaggggctgcctggatacaggaccgtagacccagggcagagaggacatgccttcttcagatgcaggactttctgtggaaaagaataaagttgccatacagtccctattagtctttaactcagcatactgttttccttcaaactggtggtcaaaacatcatcattctctcagagctggagcagtaccttcctccatgcaccatgcataagcatcttggaatgcttccctaatgaagtcatgaacaatggaagggcttatcctgggccctgtctcaacatagcagggaccacagtgaggaaggcagctgtgagggcgccaggggagatgcagagtatctgtgacgggcccagagggatctaccaggggtgtcttctggtgggtcttgcactgcctgcaaaggctgataagccactttcagtttgttgtgatcttcaaaaagcggaccccctgttggtgagttctcagcctgcacacaggctacaggccagggtatcctgatgaccacggtggccgggtcggtgtgcgtgtcagtctgctccgtcgtggtccgagtgtgctggtggttgcagtgtgttgtgtcactcactcgttccatggctttttagcagaaccagtggcctgaggactgcttggtctgcttgtgcctctggcacctacacctaggcttcctcatcctagatgcagcaagggagtccacatcagcctccctttagatcggccaggctgtgctccttgccctgctctgggcttggagagatagggctcttgtaggcgagcctactgaagactgtcactgagacaggggcataagctcttggcctggcagatcctagcactagtaaccaggcagtgttccttggaagtgggggttttgcaaaggaggttacggggttgcaggcctcaggcatcctacctaggaccttcttgaccctctggatgcctgaccataccaacaacccttagactgccttcagtgacatcagtcagtgccctggattggcttttggggaagccttcctccccaccgctgaatcaggaaggagcaaagccaggacccaggctggccccagggcccatgtgtggtctaacctgttctgccattttcattgatctaggcgggattaaggacactgcatgacattgggccagaaatccggcgtgctatatcgtgtgatttgcaagatgacgagcctgaggaaacaaaacgagaagaagaagatgatgtgttcaaagtaattattccacgcctagctacacactggccatctggaaatagcagggcaggactccagtttgggcagttaatcatccacagaagagtctggagaatgcagcccatccccagggcctagaggggctttcagaccacaccctccccctcttacagaccctccccaggcatcagcacctcttctagggccaggccagctctttccctgagcttacccagcttcccctcactgcctgcttctgaggagctcggccacagccgctggccctgtggatgagcatcctgagtccttccggcagctgcctttgctaccctcctccttcccgggccagctctttgatctgccagctggctgtcagtcccccagcccagagagcatgcccaaccttggggccaccagccagcccagctgggtataagtcaccccaacttggagcaactggaagagcacactcgagtgacagccgacagcttgctccccagctcaggaaatcggtaaccttcctcatctcggggggaccaactgccacacagtcacattcaccctgatcattgagacactcagattgttttacagggatcctacggagcttgcctagaatttgtttttcatgtagaaaaagttacctaacatagctagtctgcatcaaatacttgttaaattacctggtgttgtctcccattattttgcagagaaatggtgccctgcttggaaaccatgtcaatcatgttaatagtgataggagagattcccttcagcagaccaataccacccaccgtcccctgcatgtccaaaggccttcaattccacctgcaagtgatactgagaaaccgctgtttcctccagcaggaaattcggtgtgtcataaccatcataaccataattccataggaaagcaagttcccacctcaacaaatgccaatctcaataatgccaatatgtccaaagctgcccatggaaagcggcccagcattgggaaccttgagcatgtgtctgaaaatgggcatcattcttcccacaagcatgaccgggagcctcagagaaggtccagtgtgaaaaggtaaccttgacaatgtgtttggacttgctcatgtggtgtctgcccgtgttgcgtctagtcccaaggagcaaggcgggtctgtgctctgtgctctggggcatggaggaggttccccgtaggcatttgtgtcaggatctgtgagtgccccccaggtcactgctgcctctgacactctccacgtgatggacctaaaggataagggccacgtgccatcctacatcctgtgtggggtgccgagggaccttaaaacagcagcagccacaaaatccacctctcaattgtgctcacatactgtgcgacaggggttggtgaattgtttctctaaagggtcagtgagtcaatattttaggctttgagaaccatacagtcttgcaccttctcagctctgccgttgcagtgtgaaatatgtaagtgaatgggtgtgtggctgtgcccattaaaatttccctatggtcactgaaatttgaacttcatatatttgcatatgatgagatattttttgtcttcagattcttttttatgtttttcaatcctttataacaataaaacccgttcatagcccatgggtcatacaaggccaggtggcagcccctatgtggatggcgaatcataatttgctaacccctactctaggaggtagcctgatgtttgcattgtaaatttggttggaaattaacttttatcttctccctccttcccatgttatgcctttcctggatagaacccgctattatgaaacttacattaggtatgtgctcattacctgtttttgtgttaaatactgtgatggtatgttaccagctggcctctctgagtgctgaagaatgagaaacacttctttgagccagcctattaaaggttatcataattcatggctgtggactcagaggtcagaggttgttgcttctaagcaaaggcaccttcagatccatatctctgtcgactctgttgccatccaaggactggtgtccacacacaaggtgcaccccatgggctggctcctgcaggcctcgcgatggcactaggagcatccattgtgcatttacaggggcctcagcctgtgtggctggcagctccggctgctctctggggtcaagcttcttgtgggtgctttgcagcatgacccaaacctcctgaaggtcaggaatgggatcttgtcattttccctgtagccctcaagatatgtgtagtatattccactccacatgtattgacctgagttgaattgtgggcggaatgcccattttgttgggggccaagggaggatgggtcttcctgtgtcatgttatgaagtgaagtcgggagccatgtgggcccaagttgggtgcaagaaagtggagaagtcagaggaagtgccatccttcctttggagagaggattgacatcaccacgtccttctctgaggactgaggccaggatgagccgggtttcagggagacttaccacattcctggggcagggcagcctttggaaacatggtggacatgttctgtgacagtttcccctgtggcactgtatccagaactcactcgaccttcctgatttgatacagcaggaggtcagtggccaggaagctcctttgttccaggttctgaagtcacactgggctggagctgggggactagaaggagagggagggatcagagcagatgccctgggaacccagggtctttttccctaggtccatttttttgttctgttctccaaattgcacctattcctttggctccaaggcctctggacacaatggtttgacaccaacattgtgcagggcactgagagagaccctatcctggcccgcaggcacaccacacacacagacacacacacggtgctgttgccagaagccggaacagtccagtgctgcctgaggcaggtgcgcgctgggagaagccaggagcacccgggcagggttgccggccacaggcagaggtgcagctgcagcaggaattatctgccgcctgcccaggttctcagatcctctctcccaactgcaggtccgactcaggagatgaacagctcccaactatttgccgggaagacccagagatacatggctatttcagggacccccactgcttgggggagcaggagtatttcagtagtgaggaatgctacgaggatgacagctcgcccacctggagcaggtgagctgctctggctcctgtggagagcgggaggccgccctgccctggtgctcggcccactccggaagccagggccaccggcagctgcacttgggcttcccctaaaaagcaaaatgggagcagaaactccaggccagagggagagtggagctggagaaagagagccgcagagaggcagggtgagggctattctttcagacctgttgccttatttccactaggggcctctgaggccttttagtgaaggcttgggaaatgggagatgggcctgcttcgtggctgggttaatgcctttccaccacccgtctttggagagatcagtttttgctgaattaacacttggagctctggcggccccagggctctgtgtggacggcggcttggccagcctggagctgggccaggtcctcatgcacagcacctgcctcctgccacttcaaggggtctctcggggagatgaagaaatgaggggtcactcagcagaggggtccatcttgcttctgtcctacagaaagaatgtttgttagtacaatgggcactctgctttaggaggcgtagcaggcggcacaggcggatgaaaatcgccctccaccctcttctctgaaccgcacctcactgtgaccaggggcccagtgaagtggaagtggaatggcagtgaggtggcttctggcatctgagccacagcctgaccctcaccctctgctcccgcagcccttccccgtgcctctctcaaatgcctgacttctgaaaccactgactctgagccagatgaactcgtgttcccttctctagggcttttgctcacactgtggcccctgcttggatgccctcactccgtctgctggcctcatcccccctgtcgagggcctgctctagggccttgctttttatttccatgactggaattgaaatccctcccccaacccccagaaaagaaaacctcacgaaccgcatgagttcctctcttccagcactggccctttccagctcgcatttgatttctgtgtgctcatggcattttctaagcccattgagggtggggctcatgcttcatgcatcttggtgtccttggtgcccagcacctggcagagggaaggcactcaggagaggggctctcacggaggaaatgagtgggtgagagcctggctcacaggacatctgcgatccacatttgccctggagctgagggatcaaaactgccagcacatccctcagcacaggcctccagtcctgtaatggcccttggtctccatctggaatcttccatgaaactgaggccagccttgttctcagccaatcctactgtgtccaagggaggaggcggggagaggagtatggatgtcagtctggcagggttgagtgacagagcttgttacctagaaccttactgccctcctctctgacctccaggcaaaactatggctactacagcagatacccaggcagaaacatcgactctgagaggccccgaggctaccatcatccccaaggattcttggaggacgatgactcgcccgtttgctatgattcacggagatctccaaggagacgcctactacctcccaccccagcatgtgaggccagattttttgttttgggtggaacctcccggggaacagtgtacctctcccccaacccccgctctgggggccggtgatggatgtgtgctgccaggtcaggatccttagtcctcaagaccagcccccagccagagagtgtgtctgctttccttcctttctcatccatatctcacgtgatagagctctagcctcttcagtgctatgcttgactctctttgagaagagagaggctgtggggccctaagattgcacgcacacatctggtaaggggtgttttgcatacatagcattgtctttgaacctgggaccatcctgagagggaggcaaaccacacacatgcttttgctgttgtcagccctgctgcactctgtgatggggtgactgagcccccaaaggggaagagtgggctcaagtgcagagctggctgtgccgcaggcctgtcttgcaaaaccccatgcctctgagggccacctgggcattctggtgtccatctgtcctcaggcccctccaagccttatcctcctccctcatctctgctcctcctccctccctcatcttccctcctcctcctccatcttccctcctcctccctcatcttccctcctcctccctcatcttccctcttcctccctcatcttccctcctcctcctctatcttccctcctcctcctccatcttccctcctcctccatctttcctcctcctccctcatcttccctcctcctcctcctcccgcatcttctcctcctccctcatcttctcctgctccctcatcttccctcctcctcctccctcatcttccctcctcctccctccctcatcttccctcctcctccgttcctccctcatcttccctcctcctccctcatgttccctcctcctcctccctcatgttccctcctcctcctccctcattttctctcatcttccctcatcttcctcctccttcgtcttctagcatcttcctttatcttcctcctccctcatctaccctcctcctccttcttttccctccccctctcctccctcctcctccctcctccctcctccctcatcttccctcctcccccttcctctcccttgccttccctcctcctccctcactttctctgcttctccctcatcttcctgtcaagtctgtcagtgccctctgctcacggggcaggttctggacttgttggtccccttcactctggggccaggaaacccatcccacctagaggggctggggctggggctggctgcttccacctgctttccctctgcagcggtgggtggcaggagctggcggatctgggtcatcctgagcaaggaactccagctgggggaagaggtgcagccctggccccttccagcccttggctgaacagtttcattttggacatgtgggcattttgctgatggttaaggactatccatttctggaatttctgaggaatgaagcatatttttgaacaggactctaatcagtaaccaaaaatagccgtgacacatcggcttctgagtctgccaactgcatatactataaagagcaccactgggaggtgcccagggccctctgcctcactccaactgtcacagccccactggggagtgtgaccagacccatttccatggttaatatttaattcctcagccctgaacacatgcagctaaatgaagtcactcctttcccataaatactagatgaagcagatgcaggtgaggccgggtgatggccctcgcccttgtgagttccactgccttcctcgggcctcggcctttgtctactgcctacttggccaagcaagcaagcacatgaatcccaccagccacagtgccagagaggagctgagtgggcaggagtggctgtgctcttgattcataaggtggttttgctttgctgccccgcagctcagaccttggacaggaagaacatttccctcctccacctgtgttctcagctgcagggggattccctcctcctccagagagtgttgtgcagagcacatgagatggtggggatccctggagcattttagaaatggaaaagcaccacatacaggagagggaccgctgctctcctttcccagcccccagcccggccattcgatctggaaacctatgctccacagcacagttggcccctgggtggtgcgtggagggaaggctttctgatgaggcagccgtgtgtgtcccatgtaggcaactgaaccaggaggccccacagtgcgcactgggcacgagagaccaggactggctgtctcgttcctctctgctgggcagtgcctagccaaggactcagcccggtctcttgtgtgcagccccagtgtgcctgggagtcctcccctggctaggccctgggctttccaatagcggaatgaggggcatgtggagttttgccagggctgagaaaggaggccctgtgatccgagaaaagcagcggtcaagataggagccatagaaatgccttgtaaacgataggtgtgctctcgacagaggcccctgcaaggggtaggaggtttctgggaggaggctgctggctgtgtcttagggccccagaattcagactgatctcccgggcctggtgccctgtgaagctgggagctgtggattgtcttgttaacctctgtgtgagcctctgttggaagagctgttagcaggacaagcattttcttaaaattagaggtgtcctttgtttgtattcagtgctagagaagctgaatctttcccaacaaaaataatttgcttattacctggtcaagctgatcagtgcaggtaaagtccctccctttaaaacaggtgtaaacacaggagccccagcaagatatgtcagctgctggggacacttagggtatctggaaggtgacagtgggaagtgtcgtggggttctggcaggacttgtgttcttgcactgaagtgctgtgcgctccccacagtatgcagcgccagggcttctgactcggatcagttgccctatgggctgccttcactcctcctcctgagaacaggcgaacgtttaaaagtagtaagttctctttgggaggctgaggcgggtggatcacgaggtcaggagatcgagaccatcctggctaacacggtgaaaccctgtctctactgaaaatacaaaatagtagccgggcgtggtggcgggcgcctgtagtcccagctactcgggaggctgaggcaggagaatggcgtgaacccgggaggtggagcttgcagtgagctgagattgcgccactgcactccagcctgggcgacagagccagactccatctcaaaaaaaaaaaaaaagtagtaagtttgtactttaaaaaacatccctcactggggcttctgccttcatcctctcctactaaagtttggagacctcactacctaatctttctcttggacaaaccgcatgcttcttcctgggctcgttgctgagcatccggggccaccctgactctgaaagacggtgtcccggcagagaacttgcttcacagctgtgtgatgccctttgctttcccagcccaccggagatcctccttcaactttgagtgcctgcgccggcagagcagccaggaagaggtcccgtcgtctcccatcttcccccatcgcacggccctgcctctgcatctaatgcagcaacaggtgagcggcccacctggccttgcccccacacctaggggcaccccacataggacccccatcaggtcactcccttctccttggccttaagcaccaggagggaaggagagaatcttcacctacagtctagttaatctttgtaacaatcctgtcaaatagctatggccatgagtcccatgctgcccaagctcacacaagtgactgctggcatttgaatccagggagccagctgccaaagctggcctcactgcccaggtgcctccctgcgatccccaccacctcttcctggcattgaatacagagcctgatgtgatctgagctcagggagtgggggccacttggctgattctgaacaagcggtgcagcccttcattttctctaagaagtggttccttcattaagtttatgggtccctccatgggcagggccctgtgggtactatgcagggttaacctcccctgcctacaaagggagcagtctggggagaacagtttgcccacgttgagggcggctgcacaggcaagagggtggggccggagcccactcactagggctttccctcaaggataacaatatggcgctttttctttctgaaaatatcacatcagagatgccattcattcgtgcacgacagggtggtgggcatggacctgtgctgtttacagacagcgttccccgtccctctctgcagagtgtgaaccccaaggtgcatctgccgtggtgggattgtaagaccggggcttgtacccagtgctttagcacatgccaaatgccggctctaggatgcattactccagagcaaagagaaccagctgttttcctataagtgctgggaagtggtagtttcccctgaatgtacttcggtatttaaacccagcatgaactgggtggtgtgttcacacccacagcttgttgggcttccctgattcttcattctgaagcaatttcatgaattagcaactgatacctccttgggaaaagccaaaggaaatgcattatggattcggggtaaaagaaagcacagtctgctagaaaacaaagtcatcaccgcccattcattcagcgtacttcagtgtgcccatgtcctttccaagtccttgcctggactgcccctggcgagcgcagcgccggtgcttggtctgtgcgcagaaggtttgaggcccggacctctgagaacctctggtctcccaacagtcccctctttcctcagatcatggcagttgccggcctagattcaagtaaagcccagaagtactcaccgagtcactcgacccggtcgtgggccacccctccagcaacccctccctaccgggactggacaccgtgctacacccccctgatccaagtggagcagtcagaggccctggaccaggtgaacggcagcctgccgtccctgcaccgcagctcctggtacacagacgagcccgacatctcctaccggactttcacaccagccagcctgactgtccccagcagcttccggaacaaaaacagcgacaagcagaggagtgcggacagcttggtggaggcagtgagtacggttcttggccgtggtgggcaggaagcaccaggagcagcagaggtgcaactgtaacagcaggaagggcagtggtgggagggcggccaggctgtgagctaggctgcctcaatcagacacttctgagcagcaggaatgtacctgaagcatgagtaaaaactggtcaccaccactggctgcagtggcttacgtctgtaatctcagcactttgggaggccgaggcgggtggatcacctgaggtcagcggctcaaagaccagccttgccaacatggtgaaaccccgtctctactaaaaatacaaaaattagccgggcgtggtggtgtatgcctgtaatcccagctactcaggaggctgcagcaggagaactgcttgaacccgggaggtggaggctgcagtgagccgagatcacaccactgcactccagcctgggccacagagcgagactcttgtctcaaaaaaaaaaaaaaaaaaaaaaaaaaaacaaaaactggtcaccaccgtcaattctcataaatgagctgtgctggcattatgggtgctgttccggcatatgtttctagtttatactaaatgtctttccccagtgggtttcactcttgttgggccatgtgtagttttttagctccaggacattttcaaagccatttacactagttattatgtatgaggtctagaaaacatgattgagctgcatccccaaagcacacggtgcagttaagttagcactggagttgatttttctgtcgtccccctgccctgcaaagccttataacacccccatgccatccatccctcttttctgtacaggtcctgatatccgaaggcttgggacgctatgcaagggacccaaaatttgtgtcagcaacaaaacacgaaatcgctgatgcctgtgacctcaccatcgacgagatggagagtgcagccagcaccctgcttaatgggaacgtgcgtccccgagccaacggggatgtgggccccctctcacaccggcaggactatgagctacaggactttggtcctggctacagcgacgaagagccagaccctgggagggatgaggaggacctggcggatgaaatgatatgcatcaccaccttgtagcccccagcgaggggcagactggctctggcctcaggtggggcgcaggagagccaggggaaaagtgcctcatagttaggaaagtttaggcactagttgggagtaatattcaattaattagacttttgtataagagatgtcatgcctcaagaaagccataaacctggtaggaacaggtcccaagcggttgagcctggcagagtaccatgcgctcggccccagctgcaggaaacagcaggccccgccctctcacagaggatgggtgaggaggccagacctgccctgccccattgtccagatgggcactgctgtggagtctgcttctcccatgtaccagggcaccaggcccacccaactgaaggcatggcggcggggtgcaggggaaagttaaaggtgatgacgatcatcacacctgtgtcgttacctcagccatcggtctagcatatcagtcactgggcccaacatatccatttttaaaccctttcccccaaatacactgcgtcctggttcctgtttagctgttctgaaatacggtgtgtaagtaagtcagaacccagctaccagtgattattgcgagggcaatgggacctcataaataaggttttctgtgatgtgacgccagtttacataagagaatatcactccgatggtcggtttctgactgtcacgctaagggcaactgtaaactggaataataatgcactcgcaaccaggtaaacttagatacactagtttgtttaaaattatagatttactgtacatgacttgtaatatactataatttgtatttgtaaagagatggtctatattttgtaattactgtattgtatttgaactgcagcaatatccatgggtcctaataattgtagttccccactaaaatctagaaattattagtatttttactcgggctatccagaagtagaagaaatagagccaattctcatttattcagcgaaaatcctctggggttaaaattttaagtttgaaagaacttgacactacagaaatttttctaaaatattttgagtcactataaacctatcatctttccacaaga

SEQ ID NO: 569 - DNA, 13911 bp, Homo sapiens
gaattctagaggcggcggagggtggcgaggagctctcgctttctctcgctccctccctctccgactccgtctctctctctctctctctctctcccctccctctctttccctctgttccattttttccccctctaaatcctccctgccctgcgcgcctggacacagatttaggaagcgaattcgctcacgttttaggacaaggaagagagagaggcacgggagaagagcccagcaagatttggattgaaaccgagacaccctccggaggctcggagcagaggaaggaggaggagggcggcgaacggaagccagtttgcaattcaagttttgatagcgctggtagaagggggtttaaatcagatttttttttttttaaaggagagagactttttccgctctctcgctccctgttaaagccgggtctagcacagctgcagacgccaccagcgagaaagagggagaggaagacagatagggggcgggggaagaagaaaaagaaaggtaaaaagtcttctaggagaacctttcacatttgcaacaaaagacctaggggctggagagagattcctgggacgcagggctggagtgtctatttcgagctcagcggcagggctcgggcgcgagtcgagaccctgctcgctcctctcgcttctgaaaccgacgttcaggagcggctttttaaaaacgcaaggcacaaggacggtcacccgcgcgactatgtttgctgatttttcgccttgccctctttaaaagcggcctcccattctccaaaagacacttcccctcctccctttgaagtgcattagttgtgatttctgcctccttttcttttttctttcttttttgttttgctttttccccccttttgaattatgtgctgctgttaaacaacaacaaaaaaacaacaaaacacagcagctgcggacttgtccccggctggagcccagcgccccgcctggagtggatgagcctctccatgagagatccggtcattcctgggacaagcatggcctaccatccgttcctacctcaccgggcgccggacttcgccatgagcgcggtgctgggtcaccagccgccgttcttccccgcgctgacgctgcctcccaacggcgcggcggcgctctcgctgccgggcgccctggccaagccgatcatggatcaattggtgggggcggccgagaccggcatcccgttctcctccctggggccccaggcgcatctgaggcctttgaagaccatggagcccgaagaagaggtggaggacgaccccaaggtgcacctggaggctaaagaactttgggatcagtttcacaagcggggcaccgagatggtcattaccaagtcgggaaggtaagcagtgggggcctcctcccctaagctgttggagagttttttcctccctttatttctctgctcccagaacagtcggttggtcggttattacggcttggacgaaaagttagttcccctagaaatgtatgcacagacttccaggccctgccccggtggcaggaaatttcagcttacctgggcatctgcatgggtcttgcatttggtctgcatcctgggttccctcccgaacagacagaatttttcagtggagcacagacatccctgcagggagcaggaaagaaaaaaaaaaaaggcactctactgcaagaaactcactcttcaaaccctcctggaacatccttatttctttgttgatgttgtgttgtctgttttattttgttctcagagagaaaaacttaaagccctttccttttgtgtgggtattgggaggcctgacaccattccccggccctttctgccctccagtctagcctctgggtctaaaggggcctgctgctgccctggtcagagagaaatcgaagggcattttggtttgtttgcccacactacttcacgtgtctgtaacccaagggcgagttcagcaggcaattttgcataatttaagattatgtttgcagacttaaggagccagtgaggagacacacaccttttttttaatgtgtgaatattatcaaccatattttacataatgtttaaaggtccttgcctgaccaaaacctgcctggaagagaagatcctgtaatagtcatttaaaatcactgattttttttttgtaatagcattgaagcctgtaaaggcataaagttgatacaaaaataaaatccccttcatgatatcttaagcgttctgtctccttccaagctaaatgaggccaaagtttggcataaaatcctcctcaaactcacaagacatttagtcagttttccagcaaagtgcttccttgcttccttttaagtcaagactacagaatgccaacccttctgtgaaattaacagcaatgtggtggcacagtcttgcggttttggactggcctaagaagtgggggaatgtgttagcagctccacgggcagatcggttatcaggcccaggagtgcaccgaagtctgcaaaattcgttctgggaactcactgaagtccagtttcacttcgcccacagcgggattgctattctgcagcagggaggggtgcaacttgacgttcatttccttgataagtttaacattttctcatcaatgggtggtggaaaattctagtcttaactgaccgcgctttacaaaaatcttaccccaacctgtttagatctagatacccacagaaaaagacatgggcaagaatttgctctcaggagggcaatctgtaaagtcaagcaaggacaaaaaaaatattgaagaaattgttagacaatgtagagaattgcagtgccacaatgcatttgttttgaaccttgggacgtctaaatatggcgaaactgagaatatttaatacgttagttgtggaagaaaacgattttgcaaccagttgcctcactctgaaacatgtaagcttatcagtcacaatataaagtcttagacttggtttcaatattatgtgatacataggaaatcaaacccaagattacgggtggtttatctttctttttcttttctattctttcgttttataggcgaatgtttcctccatttaaagtgagatgttctgggctggataaaaaagccaaatacattttattgatggacattatagctgctgatgactgtcgttataaatttcacaattctcggtggatggtggctggtaaggccgaccccgaaatgccaaagaggatgtacattcacccggacagccccgctactggggaacagtggatgtccaaagtcgtcactttccacaaactgaaactcaccaacaacatttcagacaaacatggatttgtaagtttcattgctctcttcagtaaaattttctcctccttcactcagtcaaaggcagtgcttcccatttcatgagtttcagcccagacttctcctttgcttctccctaagcatagcaaacttgtcctcgtctggaaaaaggattcggggtgtttctctccaaataatggaaggcctggcgttctaaaagaaatggggcaagaaaacttaccggcttgtgttctatagcaattccagctctttggtagattcctgacctgagagtgaagttaaaaaccattttttaagagctaaaatcaatttcaaggctatgtattcctaaaggatttgttttgttttaaaatatcatacttctgttttgaaaccagtgatattattttctcaggagagtttacgtttcggagccttgactctgttggttaaatggtgtgaatacatttttaaaaactcgttcttttactaaaaaaagaattgggcttaggtgggagtccggcttaccctaaatgaggcttagatcttcagaaaaaaatggtttgtgtgttgggagtgtatatatggattcagtgacagtgcttagaaacttagaaaactttcattgcttgtagatatcaggcaaaggaccttttgcgccttttcctacccctccccaacatttcaataaaataaacagcgtgataagcaaggagtaagcagaaagattaggcccaggaagacgcgaatggcgcggaaatatcttcagcgggcaggaattgcatttgaagcccttgatttgattaaggcataaatattcctctctagagttcagcctttcagggctttaagtggattgggctcgtcaattagtgggcgcttaaagtactgaatcattttgtaaattaaaatgcatgtttttctctatcttttaagactttggccttcccaagtgatcacgctacgtggcaggggaattatagttttggtactcaggtaggctagggttcaaggtatgaatgatccttagatggtgagggtggggggggccctttggcaactgaggagcaatttggattctccagaagataacatctgtggagcgaaacgtacccagggggtactccaaggaggtgggctcggtacaagcgtggtaccctgcggtggggaagatttcagcctggcaggggtcctaagatcccgtttgttctgctaaatccttgttttatgtatgtctcctcttccctgcccctgcagactatattgaactccatgcacaaataccagccccggttccacattgtaagagccaatgacatcttgaaactcccttatagtacatttcggacatacttgttccccgaaactgaattcatcgctgtgactgcataccagaatgataaggtaaactcaaggggctttcctttttaatggtgatattttgccttccccttaaaagctgctttaagtcaggatgagaaagttacaagagagtggagacgagagtcttgagttgtcttttgtgatttgtggagcatttggggggaaaggacaatgacacctcgaggagacagaaaaacaccttgactaggtaggaacaatgctgagcaaaaaaacgccatactaattttgccacagagaaactcctagaactgctgtcattgatgccacccactcctccccccctcttgggctttgtcctgtctgttttaaggttcatcttcttccccttggggaagaaggatcaagaagtcacattcaaaaggaaccagctaaaaatttaaggcaaaagccatttgggatcctgggaggagaatcctagtagagaccagcttttctcccctagccagaaatcctgagtagctggtctggtttttattaccttttatgctgctgtgttatgatgtgtgtgtgtgtgtgcatgtgtgtgcatgcatgcgtgtggttggaaaaacctaccctgatcacagggtcatattaatcgagttgtctgaggcttttgagttggggtggccaaagtcaccacttcatttgaattccccccctcccccaggcctgaatctggaggttagaaggatccccaaaagggaaagcacctgatatctagagctatggtggcctgaaggtcatgggcacagaaaaagtgacccttactgctgattcaccagttcccagattggctgttagcagttatggggtgggaggagggactgaagacccctgctctgcaatcctggacttcaaagagagtccattttacctgacaacacacttcattttgaactcactgtcattgtcactgtccttgggtcctctgtggacttcatgatggggatgttccagctaaatttctttagtgtgaataccaaaacatgatcttctctccctgtgaaacctgaagtcttcaatagagcaatttattccaagaacatgaatccaaccaagggtccccctttccacctctgagtaactctgtgtatataacttcttcttcccaccaaggggaagggatttgaaagattacacactatagcatttttctcaaagtgcaaaatgcatgtgccctctagacccagaatcctgtgaaatgaagttgttaatgtaataataaaatgtagcatttttgatcagacaaaaaggccatgggccttctccacctaatggccatggcagagcatataaatgaaaacagatgtttccagtggtcattcagtactgtaactgtcaatattgtaatttcctcaaaccaccccccaggcaaagaaaaaaaaaattaaactcactcccgcactcactcccgcacaagggtagtgaaaccccataaatcatttattggattcatggaaaaggagtgtgtgtgtgtgtgtgtgtgtgtgtgtgtgtgtgtgaagggagtatgctataatttatgattaattgcactgtataaaaatcaaaatgaaagcataattttaagatctacaggttttccctcttgatgactttgacaacacttccatgtctaaacccaaactgttggctgcccaaagaaaagaatttctttgaataatttcatccccaaatccctggtttggcctcatataggagatacaagccctgccacagtttccttattatctcctttccctggcatatctatatgacttctgttggcagtcacatctctagacttgttgagttgggaaaaacaccctcaaaacattctagaaaatgagaacaatgtctctgtcttgcttgtgtctcttccaatagataacccagttaaaaatagacaacaacccttttgcaaaaggtttccgggacactggaaatggccgaagagaaaaaaggtgagttgaaacaattatttattagatagtttagaaaaatccctttttttaggatccaactctgaagtgttagaagtgagatgcaggcacttatcctaagagcgggtggaaatcattcactttccccactgctacatgcttgccgctatcagtatacccaggacaagtacttttcctacctccttacctttaaggaaattaactaggctacaccatacttatctctggaagagaagcatcagggataatagattatacagggatgcctattaattcctaattaatttaagttcatcctaggcaggtcccagaaagaaccatgccattgagaaaatacttgggaatttttgcaatcctgtcttccaaataccatcagacagagctggggacttcggaaagatgtatggctctctccctccttcgtggggacatgtatcattttgcattacgtagacagctggagagtatatgaaagagggtctcccctcccccaccccctttcaaagaatttctaaaatccagaaaatcacccccaaatttttaacctatccccttggggcgggcattaaaaaataattgctaacagctaaatatatttttattccaattaatttgttagtaaaacgattacagtaaagtgcagcatgaaataaccacttcctcccaatcttagccaccatccaaaatttgggtatgctggggacagacagcgttgtgtttgcaggattggacacccggttctccctatataaggctggcagtccagctgtctctgactagatccagcctcttctcctgcttttaaataaaatttcacagcccaagcaaatgccttttcctaatgaaaccccatcttgaataaatgcaactgaagcctccttcctttctccctaaccctctgccacactcttcagcccagttagagggtcaaggacaaagcttgggtctatgtggctgccctggggcaagcagatttcagtgaattagcgttgtccctgggcagcaggcagggtgtgaggtatgtgtgtgccgctttggaaagggtaagggaaacaaagaggggaaatgtatgttacattctgtaacctgggtgtgggcttctgccacagaaaacagctcaccctgcagtccatgagggtgtttgatgaaagacacaaaaaggagaatgggacctctgatgagtcctccagtgaacaagcagctttcaactgcttcgcccaggcttcttctccagccgcctccactgtagggacatcgaacctcaaaggtaaaccatgtcacctttgtgatcactggactccagtccctcgtggcctggaagagttgaagggggatggggcaccaaccagggcacttgccctttaaaagctagaagccttctaaacatccttaaacagaagccagagttcaaaaagggctatcaggtgtgtctccccttccccgctaaggcagtagaaggagagcacagaggcctttctcccagatccttatttggctggtggggaggggaggtgggtgtctgtttgcatactacctcttggcaagcagctttgaaaacttgcttgaagcgcttctctcttttctctctgtctctgtttctttctcctcccattctctccaaccaacagaggctccaactgctgacttttcactgtctttgaactctaggttacaatgtgttggactgggtgggggggaagcaagggactctgccacctggaaccgagaaggtggcctagaaaacatccagctataaagcaacaattgacctgggagaggaggtggagcactggggatctgcggtgggggtagagctgggggaggtgggtgaggagtggacaagatggctcaaatcccccctcagttacctgtgtttaaagagcaagcagtatttatttggaaagacacacacacacacacacacacacacacacacacacacacactctcaacgggaagaaacctgttttttagtgaaataaaatgcaagtcctttatgtcttcaatccatttaagctttaaacataaaataggatccctttttcttttcttctggtggaacacccacagagggtgtggtaaaagcgaaaaaagaatctatgatcgtccccgggctgtgagccatctgtccgacactcatctctctctgcagggactggggcaaatacaaacggttcaactgagtactggtgttgaaggacaggtgtccgttctgccattatcaattcagatgtcagggttcttgccaaacaaatccttccagagtaattcacaaatttgtggaaggtgctgctctctgtcattcactgattttttgatagtaattagaatatgttccagctgtgagttttaatgttactttttacttttaaaaagttaatttgcaatcgaatggggagatgcatgtgaaatctgccactgtaggaactcaaaaaaagaagtaaaattcattaaaataagaagagctactgattaggggattgtccatctaagggaaagtttaaactctgggtaaatactttaaattcataatcgcttattgaattttccagcaatgttgttgggcacgattatccccattttgcagatgacaacactgaggtgcagagaggctaaggggctttccccgggattacacagccactaagccacgagctgggattccaacttgggaactggagttccgttggctcatactggagataacgcccttctgccttggttttttccttcgcctgtggtagatttatgtcccagcgagggtgagagcgacgccgaggccgagagcaaagaggagcatggccccgaggcctgcgacgcggccaagatctccaccaccacgtcggaggagccctgccgtgacaagggcagccccgcggtcaaggctcaccttttcgctgctgagcggccccgggacagcgggcggctggacaaagcgtcgcccgactcacgccatagccccgccaccatctcgtccagcactcgcggcctgggcgcggaggagcgcaggagcccggttcgcgagggcacagcgccggccaaggtggaagaggcgcgcgcgctcccgggcaaggaggccttcgcgccgctcacggtgcagacggacgcggccgccgcgcacctggcccagggccccctgcctggcctcggcttcgccccgggcctggcgggccaacagttcttcaacgggcacccgctcttcctgcaccccagccagtttgccatggggggcgccttctccagcatggcggccgctggcatgggtcccctcctggccacggtttctggggcctccaccggtgtctcgggcctggattccacggccatggcctctgccgctgcggcgcagggactgtccggggcgtccgcggccaccctgcccttccacctccagcagcacgtcctggcctctcaggtatggatccttcttcctgcctccaccagtctttccacctttcgtccagtttccctgtcctttgccagcagaccctcacccgatccctttggcctagtagctgtaataatttttactgagccattaccgggttcaaggcttagctcatggagttattatgacttcattctccccattcaccccaaaaatctttaaaatttttccgaagttaaaggctgtttccagcagagtagataggtagtaacaaagataacagctggacacagcacttactttcaggcattcttctaagtgcttgctctgtattgactcatttgacctaacccttcaggggtactattatcacctccactttacagatgaaggcgaagacgcccagagatgttgagtgacttgtccaaggtcacacagcgggtacatggtggagctgagactcaaccccaggctatctgactccagggcctctttgagggtttctgattttagcttcagagctgacatgtctcttaagtgtctcatagccaacccttccccaggaatgggactctaggcctggggaggggaagtgactacttcctgagtaggagttcagtcttgattcctccagcctttcctcccagttcgaagctcttctccccacccccaaccccaagcaggccagcctattcctcgaagggttaatggtttgtgcacacgtgggaaatgtcagaggacagggataagcagggactggggcaggcctggaggcctgtgtgtggctcagacagctgtgctggggggaggtctcaggcggctggaaacaccctgaactcgatgaaaaggttctatgaggttttgcatgctgttgccttttgttttgtctgagcacattcgtctggtctcccttccctgcgccaagaaaccagattggcctccccactccagggaggagggagctgaggaaaggcttggcttctggcatttctcaattcctcccatctcctctgctggcttctccgggagaccctgtcctaggtgggcaggtggttggtacaccaaggactacctgaacagacaaaaccttaagggcacctcaaggcatgatgcagagaactggcccaggccagggtgcctgcatcttaaatgctgcttctgccaattcccagcttagtgcactcctgaactcctgcggcctacctcggcttctcacctggaacaccagtgaatcatgctggacgatttctttgtctctgtttataacaaatgccctttttccctcccccagccccagtttccttttgcttaagatcttcactgtctgttttttttgttttgttttgttttgtttggagaaacttctaggattggggtgggaggatgggggttggggaagaagaaagatttaaaaaattattcctactaatttatgtcctccggcttccccttggttacctctgtggggtaaactgaatctgtatccccatttaacaggtgcaaggagatttcctgggggctgcacacactgtgtgcagcatattgcaggctttcactcatttaatatctacaaagtcctcaataagtatatgaattacttatgatttccctgttttttcttcctataaggaagctgaggcacaagttaatcaaagtctcttggcctagggtgacacagctaagatttgtacctagagatttctgagtgttgacttctctcctgcccccacctatctccccccccaaaaaaaaaaacacaacaacaacaacaacagaacataccagggattcatggcttgcccaatgttggagggggagaagagaggagagggatgagataagctcctcccacccggctgactcgctgtgtgtctcttttctcaccccagggcctggccatgtcccctttcggaagcctgttcccttacccctacacgtacatggccgcagcggcggccgcctcctctgcggcagcctccagctcggtgcaccgccaccccttcctcaatctgaacaccatgcgcccgcggctgcgctacagcccctactccatcccggtgccggtcccggacggcagcagtctgctcaccaccgccctgccctccatggcggcggccgcggggcccctggacggcaaagtcgccgccctggccgccagcccggcctcggtggcagtggactcgggctctgaactcaacagccgctcctccacgctctcctccagctccatgtccttgtcgcccaaactctgcgcggagaaagaggcggccaccagcgaactgcagagcatccagcggttggttagcggcttggaagccaagccggacaggtcccgcagcgcgtccccgtagacccgtcccagacacgtcttttcattccagtccagttcaggctgccgtgcactttgtcggatataaaataaaccacgggcccgccatggcgttagcccttccttttgcagttgcgtctgggaaggggccccggactccctcgagagaatgtgctagagacagcccctgtcttcttggcgtggtttatatgtccgggatctggatcagattctgggggctcagaaacgtcggttgcattgagctactgggggtaggagttccaacatttatgtccagagcaacttccagcaaggctggtctgggtctctgcccaccaggcggggaggtgttcaaagacatctccctcagtgcggatttatatatatatttttccttcactgtgtcaagtggaaacaaaaacaaaatctttcaaaaaaaaaatcgggacaagtgaacacattaacatgattctgtttgtgcagattaaaaactttatagggacttgcattatcggttctcaataaattactgagcagctttgtttggggagggaagtccctaccatccttgtttagtctatattaagaaaatctgtgtctttttaatattcttgtgatgttttcagagccgctgtaggtctcttcttgcatgtccacagtaatgtatttgtggtttttattttgaacgcttgcttttagagagaaaacaatatagccccctacccttttcccaatcctttgccctcaaatcagtgacccaagggagggggggatttaaagggaaggagtgggcaaaacacataaaatgaatttattatatctaagctctgtagcaggattcatgtcgttctttgacagttctttctctttcctgtatatgcaataacaaggttttaaaaaaataataaagaagtgagactattagacaaagtatttatgtaattatttgataactcttgtaaataggtggaatatgaatgcttggaaaattaaactttaatttattgacattgtacatagctctgtgtaaatagaattgcaactgtcaggttttgtgttcttgttttcctttagttgggtttatttccaggtcacagaattgctgttaacactagaaaacacacttcctgcaccaacaccaataccctttcaaaagagttgtctgcaacatttttgttttcttttttaatgtccaaaagtgggggaaagtgctatttcctattttcaccaaaattggggaaggagtgccactttccagctccacttcaaattccttaaaatataactgagattgctgtggggagggaggagggcagaggctgcggtttgactttttaatttttcttttgttatttgtatttgctagtctctgatttcctcaaaacgaagtggaatttactactgttgtcagtatcggtgttttgaattggtgcctgcctatagagatatattcacagttcaaaagtcaggtgctgagagatggtttaaagacaaattcatgaaggtatattttgtgttatagttgttgatgagttctttggttttctgtatttttccccctctctttaaaacatcactgaaatttcaataaatttttattgaaatgtct

SEQ ID NO: 570 - DNA, 34034 bp, Homo sapiens
gcccacccgccgcagaggcgcccccgccgccgcccgggcccaagggcggggcccctcgctggggcggcccctccccgcccctccctccccgccgcgggcctccccagcccggccggccctcccgcgggcggcactcgggcaccgggctcgccgggaccagatccgcgagcccgtcagcctgcgccatgggctgcgacggccgcgtgtcggggctgctccgccgcaacctgcagcccacgctcacctactggagcgtcttcttcagcttcggcctgtgcatcgccttcctggggcccacgctgctggacctgcgctgtcagacgcacagctcgctgccccagatctcctgggtcttcttctcgcagcagctctgcctcctgctgggcagcgccctcgggggcgtcttcaaaaggacgtgagtgccgcgcccgtgcgcccccgccccgcggcccccggcacccaccctcgccgggccgacccttccctcccgccccgcgacccggcctctcccccggccccgtggggctgcccgtcgcccccgcctcccggccgcgaccacccctcccagctccatcttggccgaagagctgcctccctccctccctccctcccccgcagctctccctggaaaactctctccagagactgaaggtgacttctggcttatttatttgtcatcactcatccctgtgagaggataaaaccagttcccacctgcttcccccacccaccgccccgtggggagaggagtgatagagtttgcagaggtggggagggtgcccctcttacacagctcctctggggtttgtcagtagccccggctgccgggggcgggattggcagtgaggtggaaggaccgtgggagggccagctctgtggcggtgcagggtgctggaggtggcctgcggcttgactgattcccagggccaggctccactgtaggcagctccacatcagctaacacaggctgtcccttcccccgggtagccacggggtttagtgggttctgtgtagccctcctcctgaggcagccagaacatggttcctgcatgggcccccgagacacacaggacctcaccgttaaggccaggttgggaggggcagggcactttacccatagcttggtaaggtgactctccagccctggtgccaaggttcccctccactccccacccacctcatcctactcctgctgggcctctgccccacgacagggctctggactctccctggcaccacccccagaaatccccctttgacactattgcagagccttattctctcggcttaaattggacagggccacctccgggctcccttgtggaaagacagccagattcactctcccagtgcagcatggaaaacagagacccataatagaatagggaatagatgacttgcaagccagaggctgctgcttgatttccccagtcccagctcctggctgagtggtttcctagatcccatggactcagtcgagcaagcagccggcctggagaaaaaaccgcagttgggctatcccagagaaacctctggaggggccgttctgggctgtggtcatgccctttggcttaacgcctacaggtgttcgtgagggcaggtgtttccatccaccttgcttccagagctggtggaaggagcacaggtgtcagtacagatggaccccactttaagccttaaaaacatgaccaattttggaagcgattatccccattttccccaaatcttcttgtaaaccaaattattctcttcttaaaaagcaagtctccttgtgtacaccagtgttttgtgggtgtggtacaggattggaatatacagaagattcagaaaatcttaaggacaagctcaagattcattctgcctagaggtttaattagaaactaagataaagtatctgtggctagcacaggttttttggttttaagtactttgacttacaaaagctcctttacctggaacttttaaagaaaatatgtagtgcaaagaacacggaggggaaggaggataatttgaaatgacaggttggcagggcagggtttgtgaagccagcagagatgcacacccacccagctgggccatctcttcctgggtagttttgtatcttcctcagcactgcttacccaacagggggctctgaacaggcagcagagagaaccctgcagcaggaactggctcacagaagagaaaaaaaatcatggtaacaatgataactaactttattctgcacttactgtgtgccaggcactattcatagtacttcacatgtatcagcccatttaatcttcacaaccaccttgcgaagtagtactgttatctccattttatgcataaggaagtggaggcacagagaggttaagaaacttggcccacatcacatggttgttaagaagaggcctagacagaatttgaacccaggtgttgtctctaagacagatacttaggcaatccctcttgctttgtgagtcatcagtgtaaactctgcagatcaggcacaggtttgggatgagtagccctaaggatgctcatgggctgggtattcctgagctctgacaacttctgggaatgtaatggtggccctctggggcttcctgctgggatctttttggggtggggtagatcctatcagtggttgaggtttaaattctgaacctcagtcctcccacccccaagacaaaatgccatgaagaactctttcctttggttaagagcaaagcagatatacagtggaaacagagggatgtccaggggtggccttgagtgtaggcgacagtctcccaccaccttgctgactctgggcagctctcatcacagtctcccatccccccagccagaagctccaccagccctgcaacaaagctttaaagctggattctgtgggaccatgtctcagttaaaatgcaatacccctgcaagcaagtgctttgcagcttaagtgattaccagctaacgctctcacttggtttatacttgtgagtgggggattgctttaacaaatctgtgagagccagctgttgcgggggagtgggggaaagtttaggatgacacatgggagaggatagttgggggcagtgtctttctcgtgggttcctactcaggtcctgcctactgctgggcccagactgagggcacaggcagaatggggcttgtggatgcctccatagggatgtgctttgggaggactacgtgtggaaggtggagagccttggctattggagtgggtgcaggggaagacttgagctcagggcagcaccagcttgctcactctctcagagaaaaacaaaaagccacctggttggcaagggtgtgtaggtgtgtgctttgtcaggcaggaaaggggaaggggtatttagattaaaggttaggatttttcctggtttcttggggatctgtctaaccgccctagggaattaggagacccctttatctcgaaggcgtcagcataggtaaacaactttcagagcttccccaggcttctcccagcctcaccttggcctctcccctgcccatgctttcttaacagagggtttgtcagaggatctgttgagttcttcctctctttgacctattcacttttctctttttgttccttttttccccctcaaattcctcctaatctgcaagtcctaccctgccccagacctagctatgactccctcctggccattgcaccaaaccctgtcttccatacaccagttgcccaggccacccctagatatgctggccccctccagtccctggaacacaggacaaaccagcttctccccttgagctgggctgtggttggtctcccatccagaaagcctctgcctctccctccagcaccttgtctaccagtcagcatgcaacaaacctgtgccaaaagcctactgagcgtccagtaccagacattgtccttgttttaaaaatcagtctcaacatggggctatcatagggtcccaactcccaggtatgatccccaaagaattgaaaatgtatgtccacacactaaacctgtacgtggatgttcatagcagcattattcatccgagtcaaaaagtagaaacaaaccaaatgtccatcagcggatggatggacaaacaaaaacgtggtttatccagccaggtgtggtggtggatgccttgttgttccagctacctgagaggctgaggtgggacgctcgcttgagcccaggagttcaaagacaacctgggcagcacagtgagactccagtgtcaaaaccaaacaaaacaaaaatgtggtatattggccgggcacattggctcactcctatgatcccagcactttgggaggctgaggcgggtagatcacctgaggtcaggagtccaagaccagcctggccaacatggtgaaaccccatctctactaaaaaaaaaacaaaaacaaaaattagctaggcacagtggtacgtgcctgtaatcccagctactcgggaggctgaggcaggagaatcgcttgaaccaggaggcggaggttgcagttagccgagattgtgccattgcactccagcttgggtgacaagagcgaaactctgtctcaaaaaaagaaaaaaaaaaagtggtatatccatgcaacggaatatcactcagccataaaaaggaatgagatactgacacatgctataccatggatgatctggaaaacattatgctaagtgaaagaagacagacacaagagatcacatatcatttaatttatgtaaaagttcagaataaggaaatctgcagatacagaaactaaattagtagttgcctagggctaagggtaaggtgtggagatgaatggggagtgactactaatgaatataagatttcttttttatttttattttttgagacatagtcttgttcttttgcccaagctgcagtgaggtggtacgatctcatctcactgcaaaccctgcctcccgggttcaagcaattctcatgcctcaggcctccctagaagctgagattacaggcatgcgctgccacacccagctaatttttgtatttttagtggagacaggtttcaccgtgttggccaggctgccctcgaactcctgacctcaagcagtccgcctaccttggcctcccaaagtgctgggattacaggtgtgagccactgcgcctggcctggatataagatttctttttggggtgacagaaatgctctaaaggtagattgtagtgatggttttacaactccaaatattctaaaaaccattgaattgtacgcttaaatatgtgaattttatagtatgtaatttatatatcaattttttttaagttaaaaaaacctcaaagccaggttcggtggctcacacctgtaattccagcactttgggaggccaaggtgggaggaccacttgagggcaggagttcaagaccagcctgggcaacacagtgagaccttgtctcaaaaaaaattttaaattagctgggcatggtggtgcacacctatagtcccagctactcaggaggcagaagtgggagggtcacttgagcctggaggttgaggctgtcgtgagccatgattgcatcactgcactcccacctgagcaacagagcaagaccctatctcaaaaaccaaaacaaaaatctcaaaacttataccatccattaattcactcattcaacaaatacctcttgagccggatcctgttttaagggtgactacaacagacaaagtaaaagtcgctgcactcttggagcccacactgtggagaattttacattgtgaaatgaaggaaatcaagcagggtagcatggagagtggcacattttgggggccacttagctaggtgatcaaggaagccctttctggggagatgatattaaagctgactcttgcgcgacaggagagagccaggcgtgcaaagaattgagggagaggtgttccaagtgaacagactgcaagttcaagctcaaccaacatctaaggagcacgccctgtgtgcctagcaccatggtgggccccaggggatgccatcatgcacaagttgcagctcccaacctcagagtctaacagggtggtcctgccgtagcttggaatctccccaaagaccagtttgtctgcccctccctttggatctctccagctttaacatggggcccttaacaactgaggtgtcagtgtgaaggctggggtgaccaagttagaggggggcctttttatccctggccttgccctcagtctcagctgccccttccccatcagcctggcctgagatagagtcaccagcctgccctagctcccagggggtcccttgtctactggtttcttgtcccaggtccccaaaccatctccttctgggctgctgccccttttggggtggataggggctagggacacttccatccgtgactcttccacatttctgctccctgcccttctcccctggtccttcgaggaaggagattttccaggctgggaggggagaggtgggaggaagatgtcctaagcatccctgctgggcagagggatcacctgggacaaacatgtgaagagaatgtcgatgccatcaggccctacccagggtggcatgggggctgggcttcagcagcattcttccccacccctggggtggcaggcaggaatgggctgcctggcatcttactgctcaggcccttcccctgtttcagagccaactattccctcctcttttcacagaaccaggaaggcaagaacaggtgctcaaggcaaggccaggtcaaagtgatcatgtatgccctgtgggtaaggcagagcatggggctgaagggggcagcagcagctcaaggtcacccagcaacaggggctgggcaggcagctccagcagagccacagctcacctgggggagaactcaggctccttcctcttccctctcccacttagaccttctgtgtggagccattaataagtaacttggtcatttctgagacttcctgaagtaggttttccagactgtccaggctatatcttgggtctctctgggccttggggaaagtgaggctctttctctaattggcctgaattaacctgtgagcccaggaccaggggagggaagaccaatgccactctgccactctgctggctttgcctgggttgggagccaagactttggatcctggctcagttctactcctctcttttcccctatctgggcctcagtttcctgatctgtaaaatgagggacaggactcatgtcattgctgccaccttagctgggacgctgcccagggtggagagtgagtggggcgggggacaagaggtaggagcaggggtatctccctccaacagttcctgggccagcctcccagggtcaccccaaagggcactgcagcaggaataggggcaggcctgggagggtagaatctgggagctggcactggtctctgtaccctgtcagctcagtgcagttctctgggcccaacattgctctttggggaagccagggccagcagggaggcagtgagcacctgggaggggtggcaagtggccaggggaaaatcccagagagtgagcaaaggaggatgaaatgtcacatcacatggactcctcgtggcagccccaacctcatgcagagcttgttatccccattttacagcagaggaaactgaggctcagaggggctaagcataagtggcttgcccaagccacatctctgggaagtggccaaggtgggcctagaacccagtattctgattccagatcgcactccatcctggatgccaaaactgttttgacatggttattccataatttttaattatccacattcctagaaggggctattgaccaagccatttaaaacaggcaataaatgtatttcggtctggctctgggatgtgtctgggacttccttttccttggcaacagcatatcattctaaagaaatttgttcaggctgatgtttggaatgcccaggcacagccctatggaagcaactggggagggtgggcagcctgggatctacagacaagatttcctgtgatacagatgtccccatttattgggaacaggtctccatcgccctaacctccaggcctatcaaactaaaatcacagtccagggagatgcagggaggggatttcccaggcgtggttctctccaacctcccttttccgtcttttctctctttatccctccctcctgcctgtggctgagcctgggacaaaccatacctccagtgggcacctagtgtccttctcaagaatgacaggtgaaaggagacaaacagcagtgaacaggacagagatgagacctggacagggcttcctgaccccttccagcccttactgaccccttctctttttcccaatccccactgtacaccgggcaccttcctggcaacccgtccctacatgattctttctctgcctctatctctgtctcccctatcagataaactagcaaaactcccacatcggcctcccagcagtgcccagtcccttctaccaggccaccccatgtgggctggcaagacaagcgttccccaagcactgcgccggtcactagccacgtccaggaacctgggttgagcgtctctgcagagccgaacatggggccaggcatggcttccacaatgaacaggcagaggcagatgcctggggaagctggtggtggagccagcagtgatgctcgcgagcatgtggatctctgctaacccccgcagaggggtgttagaggcgcatgttctagagaccgcagctgctctccagtgcttcctagccttgccattcaacgctctgcagaatctggcctcctattctcggctggcactcccctctccagcctggctgggtccgtggctccttcctctcccctcctgcatttgcaccttctgagtggagccattagcgagtaactcagtcacatacccatacacatgcacccacatgtgcacgcacacacactcctccctggaaaagcagcatagcatagggactatcaagccagaagaccttggttagagttcaggctctgtctgctgctatcttagcttttctcagcccgagtttactcactggtcaaatgggcacaacgacaaagcctgcttcatagccttgtcatatgaaccaagtgacaaacgttagcagttgtcagcagaccgtagtactcgctatcatcctggtttcctttcccatacctctgcgcagcccctgcccctgtcagtttactgatcccaggtcccgttcccctcaggactttgctgcaggatggatgacttcactttcctgcaggattgaaagacaataatgataatgagctagttcttcgagagagtttttgcacttgccttggggcatccctgcttacgcaaagtggtgagtgaggtggtagaaatgtcatgtcctggtacccgtgtcagtagagggacctctgagagtgcagacaggggactctctggctatccctgaagtcaggccacctaggaggctgcctagtctgtcttgtccagggaaagggaggggaaagagagagaactatgatgagcagcctgctgttttatcagcccacggtgtgtgttagcattgcctccccatgacgcactctccctccatctcctaacagctggccttgaggttggtccccctctcctcccccatgagttctgagctgggaacatgctggggtcatgactgtcatgatcggtaatctccccagcagatcagcctggaaacaagaaaggagaaagtaacgaactgctctatcagcagagccattctgatagaggatttaatcaaagatggggcaagatgagatggctgagggccaaggccaagagccaagggggtcaggggcagaagctctgggaagacagcctgagtgatcactggggccctcctctttttttttcagtgtgaaactcagagaggcctttccccctcccctctctcagctcccacctttccaggtccagcagccacactggaggctgatggggtggggggctctctcccttttcataatctgagaaagttcctctacaacctccagaacctgcctgctgcccaatctctcctctctgacattagactttcagactggtctcagaaaatacaagtctttatcctttctctgagagtctggttattgggcagagtgtcccaaaaaagaccttgacagagccttagacactccatccaatcattcattcattcactgatagggtagcaggccctccccctgcctgctgtgggcttttctattatctgaaaaaggggaagatcaacacggtcacctttcagtgtgtatggccacagcccctcctttccccacttctgcacatttgccaggcacagagcctgcgacctctgcctgctacaggggtcatcaaatcacctgaatacctgggttgtgggcgctggtgtgggcgtctcaggccgggtgcctgtgaagcaatggcgtcctcaccattcctgtgtggggaggacacagggcagccagcgccaattcctgggcaagaagaaatgcccagctctgagacttctgggctcaggttccatccaggtgggtcccacctgcggttgcatgcctatgacacatgcctcttgagatgctcaaaacaggttccctgaaaagggtggggaatatttttgcatttaattgcttttaagtaaacaatttagggtttaaggaaataacgtgcaattgtttgtaagtagaatactagtggctaggctttgtgaagtgtcctgcagccaccttgtgaggtagattgttatctgagcagactttgacaacttgcccacagctaataagtgagcagcttcttcctcagctctcttccttttctaccagagggggagaaatgtcttggctgcccagaccacccagtgaatggaggagaagggggaggggatgcttccagccccatcccctgacatcacccttccctcctgcagcctggcccagtcactatgggccctgttcacctcctctctggccatctccctggtgtttgccgtcatccccttctgccgcgacgtgaaggtgctggcctcagtcatggcgctggcgggcttggccatgggctgcatcgacaccgtggccaacatgcagctggtaaggatgtaccagaaggactcggccgtcttcctccaggtaagcccggccagcaggcacagggctgggagctggggagggcatgggagctccctaggccccctcagtctctcccagcctcctcccccaggggcccacttaccagctgggttagtaagttctagactcggttttcccatctctaaagcagagcagtgatccctgccctcactgcagggtgtcccaggagcctaagcgcttgggaaagaaagctctttgcgaactggaaaggtggtgtgactcagggcttgcctcccctctccttcccctccttccctctctctcctttcttcgtctttctccccccgggattcagccagcccttccctttttgtgcccaggattcagccagcccttccctttttgtgcccccttccctttagggtgttagctggtggatgctaacatggtgatcagtcccagctgaggattaacagagatggggagggaattgggcactgtcacccgagtcatcccaggctggcagggtggttgagagaggtgtgtcactcctcacctcccctcacctctcctgcttcctgcacccatggctccccattccagggctgggcaacagcccctacatggggcagagggtggggctgggggagggggctcagtgtgggtcctctggaccggaggccaggccaccacttccccgggctgaagactgacccccacccccacccgccacctctcctctgtccccaggtgctccatttcttcgtgggctttggtgctctgctgagcccccttattgctgaccctttcctgtctgaggccaactgcttgcctgccaatagcacggccaacaccacctcccgaggccacctgttccatgtctccagggtgctgggccagcaccacgtagatgccaagccttggtccaaccagacgttcccagggctgactccaaaggacggggcagggacccgagtgtcctatgccttctggatcatggccctcatcaatgtgagtgtccctggggtgggccaggtagggagctagtggacagtccacacatcccagtccaccccacacccagtgaagattcttcagatgctgagaaacgtgctggggctgaggtgtgcatcccagaggcaggaggatgggaggacaaaccctccccgggatcccctgcactactccaccatccttcagcgacctgtgattgcagttctcaaggagggtaaaacagtgagctgagcacagtgaaaatcagggtcaactttcgaattatctgaggttctgtgggaaactagttttttcctccaaggccagatgaagtggaccctggacagaccccggcaggaagtggaaggtttttctctgggtcccttcatcaatggtgggattctcctgtgccctcctgtcaggggctcctgtggaggctaggagacagacaagatgacctctgaagggccctgcctgccaaggcagcctatggtgggaacagcgagagaccacttcaccccgtgactgcgtcacataccgaggcccgctttgtacacccctgccaagtcagcactgactctggcctccagctggaaacctcctctggtgctctgcaaacccaagttgggatctctcacgttagcccagactggagccagagtgtcaggtggggagaccccctacccccatccacctgggttggggaggactgtcgggaacaccagagcatccctggctcctgggccgggggtggggagcattacagtggccactgtcttggctgtgggatggaggcaccatgctgcttgtcatggtggcttagagcctctctttgcagtaggtggacttctcagctctcctggggcaggtgggctggactcaggcactagagcagctgcccagctgctgctgagcctcagaatatgccacacacatagcactgaaaggagcctttgagaccaccattccagtgagcagcagggcaagggtgggggtgtcatgccatcaccagctcaaagccctgacaagggactgataggaggctgagcccggctggaagccctgaccctcagcatagaccatctacctgctgccccctcatcaccagtccttttccttcctttcctttgtagatttcctttccctggcccgaatctcctctgggggctctcataaacccaccctctccgtctgctccttcccttttcagcccatgcccatccattgttttggaaagaatgcggctttgggcccgttccttccaggagagacctgcgaaggaaaggagcagtgtcagtagaacctctaggctgagactcccagaccaggaagccggaaggtccggcttaagcccgaggtttgttctctcttgccccatgaagtgcaggctggagggactttgtttgctgcaggatttccggactttttctattggtttgtgtctgaaaataaacagtccagcacggaggaagatgggctgtgcatgtactcatgtgggtgcacacgcacacacacatgtgcaccccacctgcccttctctgacttttaaggtggggctgccttccctgaatggaattcttataaaattgggtgtgttcctgccagcaatgccagccaatcctctgtgaagcccttcccagcacccacctccctggaaagccccacctgagcgatcacgcctcttgtacagctgtttccacttggccttcactcaggcactctgccactacaggcctctgtgggtgggtttcctgtttcccccctcacactggaggaagggctgtgtctcccccattagggctcagcaggggctgttctctccccactcaggcctgactgccaggggccatgtctgaccttgacttctttttgagtgtgcagaaaggctcccaaggtcaccatagggaggtgccaacacaggggtggtttttgtctttcactcctgttaggtgacttgaggaaatactggtgagagccagcctgcctccaggggcagggaagggctcccccagaacaccaccaggcaggggctggcagtctgccagccttccatctctatcctatgcctctcccgtgggccaggaagagcccaatagctgggcgctctcaccagcctctgggagacatctgcagctccctgggcttcctgtctttcctaagtgaaaggaactgggctgaagttgcagcaagaaggacaatagttagacttgatgcggtacttcctggcaaccagggtggtgagacacaagcaggggcccctgagggaggtggtggaggcttccccaggcaacctcagaagcaggagccatttcccactgctctgaaggagttccgatttagcataaatagcagcaaactgaacatagggcttatgtgtacaggctgttcgtaaacatgtatttctcaatcaaaaggagatcatgtttttgttttcaagcccctgagaagagcctctgtgccctgctaggatcaacatcaccaaggcatctccttaggtagagacagcactggaaggatcaggatgccaggctccattctggctttgccccaagtccactgtgtgaccagggcagtctctcagtctctagtttacccctcagatctcttccagttctaacaggttacgactaagtgataacatcccccagcatgttttgtagagatgtgatgcccaaaagcaaagctgctttgtaaagcatcacgcaacccaccagcatgaaggagtgtgaggtgtgacactccagcaagcttactcccagcacctctcctgggccagcagagagtttgagtctaagctttgcatgcgacaaatatctgtcttttcagggacgcgagtatggtgatcaggcagcaattacagcaggcctccccactcctaccttggtcaaggcacctggcttcttaggttgggatggctcagcttttagctgggcacccttagaaaagagctgtcttctcccaggactatgcacatgcagtgtgtgcagaggccaggcgtgggaagggggagcttcagggcagggctctcctgaccctctgcctgctccccagcttccagtgcccatggctgtgctgatgctgctgtccaaggagcggctgctgacctgctgtccccagaggaggcccctgcttctgtctgctgatgagcttgccttggagacacagcctcctgagaaggaagatgcctcctcactgcccccaaagtttcagtcacacctaggtaggggctctaatgaatctgcatcctcacagcctcatgttgaggcttccttggtaacccctctcccagagagagtgaacctagatcacaggtgattttttttttttttttttttgagacagagtttcactctcgtcgcccaggctggagtgcagtggtgcaatctcggctcattgcaacctccgcctcccaggttcaagcgattctcctgtctcagcctcccaagttgcggggattacagtcacatgccactacacctggctaatttttgtatttttaaagtagagaaggggtttcgccacgttggccaggctggtctcaaactcctgatctcaggtgatccatctgcctcggcctcccaaagtgctgggattataggtgtaagccaccatgcctggccacaggtgatagtcctttttttttttaaaaaaaaaaaaaaaaaagaaaatcttggccctgatggtgcaacctgaccaagagaatgaggaaggcagacttctgacttcaccctccattctgctcagccttgccttttgttaccttgggcaagtcacctgacctctctgagccttggctccaccaagactgggagatggacaggggttattcctaacagaaaggtcgtgaaagtagaggcagtaagtgggccccatcctgcagggctcttctgactgccagccacggccctgggacatgcagagggagggagcagaagctgagactcacccctgttcttcctgtgcctcctgcagggcatgaggacctgttcagctgctgccaaaggaagaacctcagaggagccccttattccttctttgccatccacatcacgggcgccctggtactgttcatgacggatgggttgacggtgagcctgcctcagagggcgccccctactgggggacccttcacccccagactccagtctgggaaaggcaagagaaagagaggagcatgaaggtttcctggagacttctcctggagtacacttgattcaaaaatttaatctgaagtcctagggtgactgtctccagaatcagtcacagcacgttggtactatgggcttctgtcttggccaattgttttttatttttgttttatttttgttaatgctataggtaggggcctaactggtctgttgtcaaggacaggctacctgcattttttaaaggggtggtgccctattccccaattagaggtcatgctatataaacagggtactttgcttcctggaatacattacaaacctgggtgtctcgagccagtgttgtaaacaagcttcaggtggaatttaggcccagctgttcatgccactagtgacctctgttacattagttagcacctttttccagaaacttcttaggattatattagggcagtcgtgaatggctgatcaactgattgccatatgatgacctctccagagaaaaagccctaaaaacttagatgacctggtggaaagtactcgtgacagtactggttgacttccagcactgggtgtgacctcgggcaagtcacttctgtctgctttctcatctgtaaaaccagatgcttgcacacacctttttttttttttttaagtcatgttctgctctggttgaagtggggagcagtgcctgtctgcccaggccctgcgggcactcccatggagatccagagccacctctctggaacccctaggtctccacagtgcagtctgtaagctaaggcaccccagcttctgtcctcagcttgagccaagtgtgtagtgtggccttgactccaagcccagccctggctgagcctctgggagtgggaacaggcagtcctccctctgccctccccacacctgcccagcctgggctccctttgtgagggtcattgtctggctgggctgcaggtgtgctcaacagcgcccggtctctccacagggtgcctattccgccttcgtgtacagctatgctgtggagaagcccctgtctgtgggacacaaggtggctggctacctccccagcctcttctggggcttcatcacactgggccggctcctctccattcccatatcctcaagaatgaagccggccaccatggttttcatcaacgtggtaagcagctgaatagcctcctctctcttctgagagacccaggagaagccgcctcctcctggccctaccccaggacgtttgcccaggcctacattctgccagcaggatgggaactcaggagtagagggaagagaggagagagaggatgacgaggaaggggtgggagcctgggaggtggagcctacctgggtgaccatgaaaagtcccttcccctctctgggctgctgatcttatacccttaaaacataaaaggaaaggtctgtaggaggtgctggctgcagtgtgtggagcccatcccagccaacaactggctatgagcgtgaggaaagccagtgctggccctggtcctcctgtgtttaccttggtgcccagctgctcagagccctccagtcagtggaaagctgtggaggccagggatcccacaaccgtcggaatcactgcctctgggctggggcctggggatttgcatttggtagctctcctaggtgactctttttttttttttttgagatagggtctccctttgtcacccaggatggagcacagtggtgtgatctcagctcactgcaacctctgtctcccaggttcaagtgattctcctgcctcagcctcccaagtaactgggatgacaggtgcctaccaccatgcctggctaatttttgtatttttaatggtgatggggtttcaccacgttggccaggctggtcttgaactcctgacctcttaatgatccacccgcctcggcctcccaaagtgctgggattacaggagtaagccactctgcctagcgctaggtgattcttaagtaggcaggacatggaggatgaccttcaaggaactgatctgcctaggaggcaggaggtctgggcctgagcagtgggttaagacccttgccttggtgtgtccatccaggtcaccatccatgacacaggggtccacattacagacttctgccaaattgtctagtccaacctcccatcaggcttgagccacctctatctataacatcccttccaaggggttcactgtctgcttaaacacctctagtaactgcaactcactacctttccaagtagcccaatgagggtactaagtccaggtaagaaagcatttccttggttgaatttctagcagagagcgggtttggacataaggttgcagtttcagagacaaagatcatgatccccaagaaaggcctttggatttgacctcgtgccagttgacccccaagaaagaaatttcagttcaatgtagatgggaggtaggtgataaacccaaacgcaagaggttgagggtgagagggagatgagcagtggaggaatttgcatttctctttgtaaatatttttgagttgaagggagttgtgttctgcaggactcagggtggtatgggcctgcttatagtagaggataaagggaggacacctattaggaggaggagtctgtgaaaataccattgtgagagagtaaccgagtgaggaaggccctgacagaggggaggtgggatggagagcgggagtggaggaggctctaagctcagcaaggaggaaggcccctgtccatggagttggggcgaaacgatgtcaaaggggaaaggttccagaagaggaagggcacagacatggggccagccctggcttccctgtctaggtcagacacaaggccaattgctaagacagaggagagtgggtggaaatctgggtttgggaaaataaaggtctgaagcatccacatatgttaggcattgcccatagacactcacctggagtgctgggttttaaaaaggaaaatcaggttcctgggcccaacccagactgagtgaatccgaatgtccaggaggaggcatagcaatctataaattaaacaaataccccaggggaattacatcatccagcaagctcaggaaaacactgtcctagaacaagtgactcccaaatacattagattcactggagctgctttttgaaaataggatcatgaaaaggccaggcgcggtggctcacacctgtaatcccagaactttgggaggccgaggcgggtggatcatgaggtcaggagttcgagaccagcctgaccaacatggtgataccccatctctactaaaaatacaaaaattagccgggcgtggtggcgcctgcctgtaatcccaactactcaggaggctgaggcaggagaatcacttgaacctagcaggcagaggttgcagtgagctgaaatggtgccactgccctccagcctgagagacagagcaagacttcaaatcaaaaaaaaaaaaaaaaaaaaagaaagagaaaataggatcatggacccctaccccagagattctaatttaggaggtatggagaagagcctgggcctctgggttgttttggaagctttccagctgcttttgtgggcaccctgtttgggaactgcagctgagtggccctgagcaagcctctcctgtgtagatgtgaagtgcctgtgtcatattcactgtgactacttccgagtattcctctctaggttaaattaatggccaccctgttctcagcattctcctggagctcaacagctacttcctgacttagtatgtttgtgctatgtgcaaagccctgctgcaaactgcaggccgccaagttctggaagacaaggttcttgcttccagggagcttacggccggccagaggagggcagtgtgccccagcacagatggagggtgagggtgtaggcagtggggatgcaggctcagtaccagactgagtcactggctgaggcaggggccacactgcgtgggaagagagttggtggagctgatagttcgtcctggttagtcttctatcaccaaggctaaaataagactcgggtgtctttcaaacttccccaaatttagggattttcagggtgacggtctttgaggcatggctggaaatgcatgtggtttgtacatggggtagccaggtggaagaagaggagcaggagtggcggcttccaaaccccggcatctgtcccaggctcctaagttgaacactgaatattaagaaggtgccagcccctgaaggcaggaggtgagcaggcctggctgaagttcaaaggcccgtgttcaaaggcctgggttaggggctaggaggctaacttggggggagcacggtaggcagggtgggggatcgggagcagaaaaagatgaggatggggaagtaaacaggggctacatcctcagggttttgtaaggtgggctttgaattttattctaagtgggcaggaagccaataggttttaagcaggtctgcgttgcattttcttttttctttttatttttttgcatctcacagatacatttattcatgctatgaagtaaacgacacttatacaggtgccccgtgatgtttcacatttccatctaacatagcttgcattgcatttttaaaatttattattgttttttttagagagacagggtctcactatgttgcccaggctggtcttgaactcctgggcccaagcgatccttcctgcctcagcctaccaaagtggtagaactagacaggagccaccatctccagccacttgcactgcattttaaaagtgcactccagtgtggaagaacagactgtagctggcaagagtcaaacacagactgtctgttattgtagtccaggcgcaagagggaggtggctgggatggggtggtctggatggatctggagcagtacaaggatcgaacatgttttttgagatggtgtggacaggacttgttgctgacccaggtgtgggaggtaaggaaaggaggaatcaaggaccttagacacaggacttgagcaactgcatgactgggatgccctcacttgatgtgtgcaggagtaggattggcagaggaaattaagagtctagtttgggccacatggttagtcatccagggactgactatatccaaggggcagctttaggtgcaagtccggagtcctggacacagctcatggctagagggatagatacaagcatgcctgctgtagaggcaggtgaaacgtggagcagggcactgcggacatggaagagccagaagagaatcctgggccaccccaacattgagagagtgaacagaggggaaagcaagaacaaatggatctcagggaccatgttctgtgccaaagaaagacatgacctttggaaccatagttatgctatgactttcatatttttactgcatgaaagaagtcttttgtctttccatttccattctgaagggaatgtgtttctctccttcggccactgttttgtggctgatccctccccagggaaggaagtctgtctgggtaaggcctctgagcctcgagaccaccttccacctaacagatcctgtggcagagacggaagggctgctagaggagcgtaaaggcctcaaggattaggagcaccggctttgattttccaattggagcaactctcccaggatcggctcccaaccctgaaagtctttcctttctgcatgcccagaagtggaggggttgggagctggatgagatttcttgcctagctctatagtctgtacttactttttaaagaaacagatgtcttcatccaggagatttttacctcaaagccataggctgctatagaagatccttatctcctgagacgtctaagaaaagcccacagagaaacactaggactcatatttgtctgaagcaccacagtttacagagccccttcatctgtattatttcaccaccactctttagtgtggcttttgtaactattcctattttgcagattaggaagttaagaatcagagcaatcagctacttctgggttccacagctggtaaaaaacacatcgggacttccacctgggtcttctgaccccaaatcttgtgctgcctgggtttattcccagatacatcttgcacagaagtgactcaatgcagacataaaaacgtgtttaaagaacttagaaatatggttatattaacaaaaacatgcctgtatgacagagacctttactgaactagaaagatttggctgggcgtgggggctcatgcctgtaatcccaacagtttgggaagctgaggcagatggattgcttgagcccagaagttcaagaccagcctgggcaacatggcgaaccctttctcgactaaaaatacagaaaattagcaggcgtggtggcacatgcctgaggtcccagctactcaggaggctgaggtgggaggaacgcttgagccctgtaggtcgaggctgcagtgagctgagattgcaccactgcactccaatttgggcaacagagtgagaccctgtctctcaaaaaaaaaaaaaaaaaaaggaaagaaaagaaagatttctgggtctccaaccataggttagcatctgcccatgggaatctgagccaaatctgagggtgccaagctgactgccacagccactgaccctctccctgggtggctggctaggattcccagaggatgggaccctgctgccaccacccctcttcccctgctatctgatggcttcctgtctgtgcactcttggctttcaggagaagagaagcagcttctcacaaagaaacagagactctcctacccccagggctggcagggcagagagagctgatgaaattggcttgggtggagttcccgcggttacagataagaccttggggacaggtagtcctcagtccccaaatgcttacgcagcgtgtaccgtagctgttaggggagatgtctaggtgggaagatgtctaggcgggggtctcctttccacgcttccttccagatgtcagaacggtccccggaacactgcggttcccgcctggtccacggggtggcgcgcgggtcacacagctgggctccttgggctagagaggaaacgccaagccaggagacgccgactcctggcggttcctcaccaccgatgctcagcttttcgcaattcctaaccgcctccacctctgccgcgacaggttggcgtggtggtgacgttcctggtgctgcttattttctcctacaacgtcgtcttcctgttcgtggggacggcaagcctgggcctgtttctcagcagcaccttccccagcatgctggcctacacggaggactcgctgcagtacaaaggtgagggccgggcccgagccaggaggcgcgctctatctagctgggcgccgccgcctcgctctgccctgtctctctgtgctctttttttttttttttaattttattattattatacttcacgttttagggtacatgtgcacaacgtgcaggtttgttacatatgtatacatgtgccatgttggtgtgctgcacccattaactcgtcatttagcattaggtatatctcctaatgctatccctcccccctctccccaccccacaactgtcccaggtgtgtgatgttcccctgtgctcttctaggccagcaccatctcccagcgagaacgctgccctagctccctggagaaatgaacacccccctcctgactttggcgggagcaggcccacagccggggtggttctgacccgctgggctccctccattcagaatgatccccgtaatgatgggattttaggccgcagagaagcagttaagcttcttttttccatccgctttgtccccatcgtaacgtctgctgacctgcagctgacattttgtgcgatatggatgtgctggaaatgccaagttcaaagaaaagcaaagatgcacaggagaagttatggcataggaaaggcattttgtaagctaattttcagtaacagtacgtgcctgccttgtggctgtggtggatgttagaaacgtggaggattagaacacagatctggtttcaggagtcacacagcctctttgatgtcagaaatctctaattctctcgactaatctccctcccctttccctagcctcccgagtgcctatagcaaagatctcttttttaatgagttaattaaaaataattatattttgaacatcaccagagacgcactagaggctggaaaaccagcattaagataagcgatttctggccgcgcggggtggctcacgcctgtaatcccagcactttgggaggccaaggcaggcggatcacgaggtcaggagatcgagaccatcctagctaacacgctgaaaccccgtctctactaaaaatacaaaaaaattagccaggcgtggtggcaggcacctgtagtcccagctactcgggaggctgaggcaggagaatggcgtgaacccaggaggtggagcttgcagtgagcactccagcctgggcgacagggcgagactctgtctcaaaaaaaaaaaaaaaaaaaagatgagcgatttctttagagaggagtgggggaagttggtgtacagggagagtcagggcagttagagcttcacccagcagttatccacagcctggatccttgaaattgaaggataagccccagacaattttagcacataacatcaccatcagtcgttaggaataaaatcttttctacgataaacctgcacactttttgttttgttttcaaaatggaattttttttattatataagtcgtatgtgctcactgcaaaaacctcaaacaatagaagcacagtttaaagcagtaagtgaaagtagctgaaaataaccctcttagcagttcatttcctcccagatcccttctgagcttgtgagaccattctctgcgctgtttaatatttgcagtttagaagacaattcctgtgagagaatgaattagagaatcaagtgtatctgagtttctttggcttctggctcctctgagtgggggcactacacatcatctgagaaacacccccaaatcagggcacacttggtataaattccattgaatcatgactctgaagagatcctggccacggtgaaaactgagggcagaaaatgcatcagccagtcatcatccaggcagcccatccctcacccatctttctgctactcaggacatcatgctgggccccacgggacatggccaaggaaacacagtctctccctgcagcttgtcctaacaacaggacagccacgcacccagctcccatgggcgagggcccaggagccctcagactcctccctcacgcatcagtctccaagcctcaagggaataaatgaagtaatgaaataaggtagctatcacatgtcacacagtacaactcgagagttttaagtgatcaacacatgttagagtttaataatgataagtgaggctgggtgcagtggctcacgcctgtaatcccagcactttgggaggctgaggcgggtggatcacttgaagtcaggaatttgggaccagcctggccaacacagtgaaaccccagctctactaaaagtacaaaaattagctaggcgtggtggcaggcacctgtaatcccagctacttgggaggctgaggcaggagaattgcttgaacccaggaggtggaggttgcagcgagctgagattgcactccagcctgggtgacagagcaagactctgtctcaaaaaaaaaaaaaaaaagtgatattgattgattctgcctgcaaatgatcactcaaatccatcatcttcatttcttactgtccctgcctaatttaaggtctttatcttcattgacctgcttggactagttaatggtacccaggtttttccaagttctaatcacctccatcccttctttgatgggtcttggcttgtctccttgtcttcagtcttgcctccatctaacccagctggctgaacattaaaatcacctggagttctggtaccaaaacccagtgattgggccttacctctgagtctgatgcaactggtccggagctgctgggtgattctaatgtgcacctagaggtgaggaccatgtactaagccaccctccacatggtaaaacagggctgtgcttacttcagcagcacatgtactataattggaccaacacagagatgatgagcatggcccctgtccaaggatgacatgcaaatgtgtgaagtgttcccccaaaaaaaccagaaaacagagctgatcacaacctccagatctacctatggggcatctttctctccagacttctctctccctgcttcccctgcaaacctgcatcctagccacgaattacatgctattccctgatggcacaaaaactgttctgtacctccctactttggcacgtggtgaaccctctgcctggaacatcctccctgctccatctcgcccctttatcttcctgctcttccttccagacctaactccaggaagtgtccctctccaggaagctcctctgatccccactggaaaggtgtgcctcccctttgtgccctttgacgttgcccctgtctctcatgtttgacccatctcaagacttttgtacctaggttatctgcttctcctagacaacatgaccctaccaagggacaagggtaagagcacgggctgtgcaggcaatagcacacctggcagtcctgcctccagagttactggctttatgaccttgtgcagtttcacttccttcccctctctgagcctcaattttctcatctgtaaaatggggatgcaaatacctgccttttaggattgttttgtgcatcagaaaaaatgtaaagcttttgacttagcatcaaagctgactcacaggcactcagtgtcttgttaactcttagtattcacctgagcatcctcagtggttagcatagaacccagtggtcctcagttttttaaacaaatgagtggaacagacagatgggtgctgctggaattcagggaagggagtgagggggcagtgttgatttaaataaaagtagcttcatagaggggatgggatgtgagctggaccagaatctagaaaagcagagaggaaaatggaaaggccttcctgggtagggtggggcagtgaacagaatgagagcaaaggcacagagacaagtctgaacataagtgagactgaacgagctagaaggaatgtgaagtccagagtagacaatgatgacaaccattttattaaaaaaaaatagtgtctactatgtgttagctgctgtgctactaacaggcactggtttttgccagtgatctataagacaaggcatggccatcctctcctgggcttccagcctagtggggagggctagctggtcaacagacagtgtggtgagagcaggtgcagagtgatatcacagcacagagaagcaacccatccaggcatggggaccagagaggaacattactgatggaagtctaaactaggacctaaaagatcaatgggaaccagctggccaacatggtggaaccccatctctactaaaaatacaaaaattagccaggtgtggtggggcatgcctataatcccagcttcttgggaggctgaggcactgtactccagcctgggcgacagagcaagactctgtctcaaaaaaaaaaaaaaaaaaaaaaaaaaaaaaaaaagatgaatgatagtttaccagaaaagaggaggaggatgaatgttcagtggggagtgaagatgtgtgctgaagcctggaggtgagagttacggagggtggagggggagagagaagcctgagccattagcaggggcagagtctaaagggctctgcaaaccacttgaaagtccttggccttcatcctgaaggcagtgctgaggggcttgcgcagagagttgggctggttttgagtttactgtgtgccagtcctatgccaggctcttggcatgtcttacatcagagttacccacacggtaagtctgtgaaggaggtgtgatgctcatcttacagagaaggcaaccaaggcctagagaggttagagaacttgtctaaggtcacatggccagtaggtgacaacctgggcttggaacccaagtctgactctgaagcttgggctctgaaggtgtgcaccacactgccagactcatcagggcgtgtggctggtcagtgcaatgccaggacagcgaagacactagtctgcctgcaccagagggctagcctcaggatatcaggaaatctttctggaaaggtaggtagcagtcagaatgggaatggcgctgaatgccagggctaagcaagatgggatttaccctgagatattgatgagcaattaaaggtttcagaacaaggaaaggacaaaatgacagtaagacctaggcattcccaaagcaaagttacaggctcatgtctgagaaatccaaagtagtcctttctgccaggccatcttccagaggtttcccagaagcaacctaggttgtttttttttttttttttttttttttttcgttttttgacagggtctcactctgtcacccaggctggagtgcagtggtgcgatcatggctcactgcagcctccaattcatgggctcgagggaccctcctaccttagcctcccaagtagctgggactacaggtgcacaccaccatgcccagttaatttttttaaattttactttttgtagagaccaagtcttgtgatattgcccagactggtcttgaactcctggcctcaagagatcctcccacttctgactcctaaagtactgggatgtgccttccgaaatgcatatgccactgtgcctggccagcaacctggattgtaatgctggcttctgtctccttaacttgcttttaccaaaccaaaccttctctttttgttaggctgtgcaaccacagtgctggtgacaggggcaggagttggcgagatggtgctgcagatgctggttggttcggtatgtggggacctgtaagggagaggggagcatttggggagcactcctctgacaggtgagaagatgcagatagccaccttctgaactcaaactgtccctttcctgagtctccagcaaagccagcagggccccctgtgccgttgttacctgtttccgtttccaagccagccctgagagctgagcctccatatgtgggatctggagatgtaaacggatgcatggaaaagtccaaagcaaacacaagccatgtctgggagcagggccagagggggcccgtgggaatgctgtttagctctcagagcctgagatgggttggaactgcagtcagagttctttttccatcccttcggaacccaccactccctaccccacctctcacagcctctggccaccctgcagagggcccagcttcctgctcaactcctgccctgaccgagagggccaactcttccagttctattcaaatccacccatgtttcatttattcaccaggaaaaaaaaaaaaacaacctaacatctactttttattgaatactataatgtagatattattcccctttttacaacagaggacacggaaactcagatgaatttagcaacttaccctaggtcagtcacacttccagaaactgacagagaggacctcacatctagatcttccggcctccaaaatctccctcattgtgactccattctcctttcctcctcttttgccctgctggagggaggggaagagctgcatctcaccataccctcctcattgaaatgatgtgacatctgggacttgctttagtgtaacctagtgcagaaaagaagtgcaaggccaccaatgaaaccggtgctgactgctaaagttgagtgttgggttcattggagctccatatactactttaacatgttttaaattctcataataaaagagtaaaacaatatatcctctgcaaagttctggttagggcttatgggtatagaaacacctagtatgactggagcttcagtgatgatagagatcgtcagaaggttccagaacacagagctgcaagggactgcagggggtcaccaggtccagtccctgccttagagcaggacttcggccttctccagacacatcaacttgaaacaaggccaaggcctccctcctccccgtgattccatctcttggtgtgacgggcctcaacttagctgaaaaaccagccaaggatggagaaggctgcttcctccgatacaccttccacgtgaagttttaattgtctgtctctctgtgttttcccctttggcagatattccaggctcagggcagctatagtttcctggtctgtggcgtgatctttggttgtctggcttttaccttctatatcttgctcctgtttttccacaggatgcaccctggactcccatcaggtaaggaaagtatctgtttctacacaagaggaggaaaacagagccggggtcggggagcgggggagcaggagatgctatggatcttaacgtgccagaaacgctgctctgttccaagtaaaatgcaaggaaatgtttatttttctacagcttccttttcctctcttcctgctttccatacgattgtctgcgctggactcttaagataggcgagagctgggtcggctgactcatggtttctccattagcagaggggtatggattgtgaacttggcttcctgcatcccaccatgtcatgggaccatgagccaagaatctctttccagcctgttcagggaactgaaaggcagagcccgactccttggctggaactcagcccaacggcctaattggccatctctttgcagttcaggattttgattctagtccaaatctttttttcaaaaagaagtccttcaggccaagtagcaaagaaagtctccttcagggcacagacacctcctaagaatagtctcccttctagagaccccaggcagggggagtcccaaagcaattttcataaccctgagcccttacctgcccttttgcccactgctttcaaagtgcccagggactgcatcggctgtgtgcaaagccagttcttaagagaaggtgcccaggcggagactctgtcctccctataaaaagcaaaatcatcacaaaaagactaaaggaacaggcattcaccatccgctctcagtgggtgaacatatctacgctctaaacgctcagtacaaaggcccagaaggaaaggtggcccccaaaacagcactaactatagcctcacttctgagacagcagtactggttgcacacacacaggagtttcatttaagacctacattcaattaatatttgctgaacattaaatgaataacacttaatgggctccttattcatgggagacagacacattccccaagccctagacagcagtctcaggaaactgcctccaccaactgttcgccagaactagggggtctgacttttcactttgctccctctagagccacagaatggcagagaaacaaacagcctgggtaagctctcagaatgaatcatcactgcaactcatcagagctgctgaaacatgctacctgttttgtttttcttttgtagttcctacccaagacagatcaattggaatggaaaactctgagtgctaccagaggtaaaactgggtgaagaaggcaagagaagactttcagcctcttgatcaccagcacgaccatactgtttcagaaagctgggtggtggtggaggcgctctctcaatggctattcaagtcttctccactaaaacttggttgggtagaggaaattaaattgagtcctggtacctggtcaaaatcattagaagtttacctggcttctcaagttatcttcttccctggttcagactgttggtaagagctgtccagatacccagatgggaaggaaggagacagccgcgcgcttcactccatttgtcacctcatgcatggaccatactctgggtttgagatcattcttcattgaagtttgtaaaaataggttgaaattgtaaagctccatgatcattgctatatgtagatatatttcaatttaagcaaaacaagctgcaagttattccctggcatgctcaaaggattttcgtgcttttcacttaatagtccaaagtctcttaaattcctgctgcagacatcaatagcttatctatattctcaaacaccaaaaggaaaagttgaatcttgctctctttggtatactaatgtagtggtatgctaagctggctcataccaacttagaaaagctgattgtaaaattttcattttgacagctggttattaaatgcagccattattaaaaatcaaatcatacaaacttataattaaatcaattacatttaaaacaaaggtaataaatattcaaagcatatcacttcctaatttgatcttgatgctcttgaggtaatttacgtccatggtacctgtgtggtggaattactatatatgatggtgtgctactgtgcaccttgtctcaactccactcttcgtgatagcatgttggtagcttgaaatcagcctggtgggagtattaccatggacactggcaaaagctacagatcccggagagccagtggttaaacatttaccagcataccactgctagtaatcaaggctaactggtccagaaatcgcccaggagaatgaaatggatgttccatttttttctactgacattgactagcatataaaaggtatagaaacagcactaagactttctgaaaatacctaatgaaaattttacatctttttttgtttttgtttttgtttttgagacagagtctcactctgttgccaggctggaatgcagtggcgtcatctcggctcactgcaacctccgcctcccagtttcaagcgattctcctgcctcagcctcccaagtagctgtgactacaggcgcatgccatcacgcacagctaattttttgtatttttagtagagacgggatttcaccgtgttagccaggatggtcttgatctcctgacctcatgatctgcccgtctcggcctcccaaagtgctgggattacaggcgtgagccactgcacccagccaaaaattttacatcttttatagagggaaaaaaactctttataccatggcaaggccttttctttcacaaaaagctgggcctactgaacaattcaagctgtgcagtagtagactgaaagcaggatttgttgaggagttacagctcctgtccagagcaaatcctgtagtgatacaaggagaatgtaaacttgccagcttagacagggatcagtcctgagactgctggcagtagcaaatggctattagagtaactgtataatggttttgcctgcactttctctatgtatatacaaatgtacatgtataaatataaaaattaagtgatcatggttcttggtaacctgtcccaagtgctgtgattcacacgcctgacactaaaaggttcttcctggtccagtcagccagctgtgaccaccagcagcacagctgagtgctgagaatctggctggaaagagaaacgtggctcaagtgctggctcaccttctagctgtgtggccctgggcaggttactgaggctcttccaacctcacttttcacatgtaaaatggcatttctaaaagtacctaccctacctcaaaggaattctgaaaaaagtaagtgaatttgtataaagcaaagcactcacaatatgcctgacacacaaactgcttaataaatgttagtaatttttaaaacctcctcataagcggcttagaaattattcatgtttggtacatatttattgcaagtcaagcagatccaacttttttgaaagctggtggtctaggagtatagttttaattatatttgtaaatactcaaaagtattagatgccagtctaatttaaatgcagtctgactgtagcgagtaactgacctgggcaatgaaaaagcagttgtatttttcttgtggtttttcaagaaaatatcctttttatacagatttagaaagaagaatcaatggctatatcgaagttgattgtgactaatttgttaatacagaaaacaacattaacacaaatctaagagtacctttcctaaaataaaatatttaaactta
